United States Patent Application Publication US 2022/0256795 A1 - sequence listing, part 7

SEQ ID NO: 5 - DNA, 1966948 bp, Glycine tomentella
  misc_feature (7504)..(8150): n is a, c, g, or t
  misc_feature (10734)..(11814): n is a, c, g, or t
  misc_feature (20358)..(20598): n is a, c, g, or t
  misc_feature (26385)..(26579): n is a, c, g, or t
  misc_feature (32722)..(33739): n is a, c, g, or t
  misc_feature (39864)..(40299): n is a, c, g, or t
  misc_feature (47711)..(48352): n is a, c, g, or t
  misc_feature (68586)..(68831): n is a, c, g, or t
  misc_feature (72251)..(72691): n is a, c, g, or t
  misc_feature (80375)..(80384): n is a, c, g, or t
  misc_feature (81081)..(81862): n is a, c, g, or t
  misc_feature (90066)..(91178): n is a, c, g, or t
  misc_feature (96404)..(97282): n is a, c, g, or t
  misc_feature (101204)..(101822): n is a, c, g, or t
  misc_feature (108393)..(109057): n is a, c, g, or t
  misc_feature (124587)..(124971): n is a, c, g, or t
  misc_feature (149640)..(149818): n is a, c, g, or t
  misc_feature (154670)..(155896): n is a, c, g, or t
  misc_feature (156372)..(157519): n is a, c, g, or t
  misc_feature (166810)..(168477): n is a, c, g, or t
  misc_feature (169286)..(170940): n is a, c, g, or t
  misc_feature (174496)..(175781): n is a, c, g, or t
  misc_feature (177170)..(177584): n is a, c, g, or t
  misc_feature (182202)..(184208): n is a, c, g, or t
  misc_feature (188991)..(189065): n is a, c, g, or t
  misc_feature (189827)..(190236): n is a, c, g, or t
  misc_feature (212674)..(212993): n is a, c, g, or t
  misc_feature (227240)..(227249): n is a, c, g, or t
  misc_feature (232892)..(233559): n is a, c, g, or t
  misc_feature (240512)..(240886): n is a, c, g, or t
  misc_feature (244342)..(245152): n is a, c, g, or t
  misc_feature (249043)..(249519): n is a, c, g, or t
  misc_feature (253165)..(253174): n is a, c, g, or t
  misc_feature (254620)..(255109): n is a, c, g, or t
  misc_feature (270096)..(271085): n is a, c, g, or t
  misc_feature (277057)..(277614): n is a, c, g, or t
  misc_feature (283272)..(283526): n is a, c, g, or t
  misc_feature (285102)..(285257): n is a, c, g, or t
  misc_feature (286105)..(286353): n is a, c, g, or t
  misc_feature (293337)..(293346): n is a, c, g, or t
  misc_feature (298634)..(299634): n is a, c, g, or t
  misc_feature (304935)..(304944): n is a, c, g, or t
  misc_feature (310909)..(311682): n is a, c, g, or t
  misc_feature (313997)..(314628): n is a, c, g, or t
  misc_feature (318721)..(319507): n is a, c, g, or t
  misc_feature (326696)..(327433): n is a, c, g, or t
  misc_feature (330571)..(332039): n is a, c, g, or t
  misc_feature (332842)..(333085): n is a, c, g, or t
  misc_feature (351192)..(352188): n is a, c, g, or t
  misc_feature (356966)..(358976): n is a, c, g, or t
  misc_feature (360083)..(360092): n is a, c, g, or t
  misc_feature (368422)..(368830): n is a, c, g, or t
  misc_feature (369693)..(369755): n is a, c, g, or t
  misc_feature (374012)..(374726): n is a, c, g, or t
  misc_feature (376769)..(376938): n is a, c, g, or t
  misc_feature (400807)..(401205): n is a, c, g, or t
  misc_feature (404267)..(404509): n is a, c, g, or t
  misc_feature (407308)..(407535): n is a, c, g, or t
  misc_feature (409840)..(410139): n is a, c, g, or t
  misc_feature (413432)..(414181): n is a, c, g, or t
  misc_feature (415583)..(415592): n is a, c, g, or t
  misc_feature (420779)..(421530): n is a, c, g, or t
  misc_feature (422178)..(424409): n is a, c, g, or t
  misc_feature (427794)..(428277): n is a, c, g, or t
  misc_feature (440364)..(440469): n is a, c, g, or t
  misc_feature (446931)..(447159): n is a, c, g, or t
  misc_feature (458166)..(458313): n is a, c, g, or t
  misc_feature (465841)..(466440): n is a, c, g, or t
  misc_feature (467704)..(468794): n is a, c, g, or t
  misc_feature (491679)..(492025): n is a, c, g, or t
  misc_feature (494379)..(494796): n is a, c, g, or t
  misc_feature (497047)..(497360): n is a, c, g, or t
  misc_feature (499672)..(499920): n is a, c, g, or t
  misc_feature (519381)..(519426): n is a, c, g, or t
  misc_feature (523545)..(523946): n is a, c, g, or t
  misc_feature (538320)..(538567): n is a, c, g, or t
  misc_feature (542165)..(542752): n is a, c, g, or t
  misc_feature (544415)..(544453): n is a, c, g, or t
  misc_feature (567758)..(568886): n is a, c, g, or t
  misc_feature (574129)..(575180): n is a, c, g, or t
  misc_feature (579541)..(580373): n is a, c, g, or t
  misc_feature (586447)..(586771): n is a, c, g, or t
  misc_feature (590267)..(590551): n is a, c, g, or t
  misc_feature (603951)..(604208): n is a, c, g, or t
  misc_feature (605417)..(606302): n is a, c, g, or t
  misc_feature (608586)..(610014): n is a, c, g, or t
  misc_feature (612016)..(613153): n is a, c, g, or t
  misc_feature (615079)..(615810): n is a, c, g, or t
  misc_feature (617968)..(619202): n is a, c, g, or t
  misc_feature (622877)..(622886): n is a, c, g, or t
  misc_feature (637855)..(638370): n is a, c, g, or t
  misc_feature (658468)..(659188): n is a, c, g, or t
  misc_feature (660779)..(660788): n is a, c, g, or t
  misc_feature (663956)..(664457): n is a, c, g, or t
  misc_feature (668242)..(668251): n is a, c, g, or t
  misc_feature (672470)..(672788): n is a, c, g, or t
  misc_feature (673667)..(673676): n is a, c, g, or t
  misc_feature (674747)..(674985): n is a, c, g, or t
  misc_feature (681184)..(682536): n is a, c, g, or t
  misc_feature (682907)..(683895): n is a, c, g, or t
  misc_feature (694441)..(694788): n is a, c, g, or t
  misc_feature (702649)..(703533): n is a, c, g, or t
  misc_feature (705263)..(705272): n is a, c, g, or t
  misc_feature (706346)..(706482): n is a, c, g, or t
  misc_feature (712298)..(712536): n is a, c, g, or t
  misc_feature (720417)..(720937): n is a, c, g, or t
  misc_feature (739952)..(740634): n is a, c, g, or t
  misc_feature (763932)..(763961): n is a, c, g, or t
  misc_feature (769833)..(770659): n is a, c, g, or t
  misc_feature (773201)..(773657): n is a, c, g, or t
  misc_feature (775640)..(776968): n is a, c, g, or t
  misc_feature (785274)..(786272): n is a, c, g, or t
  misc_feature (788123)..(788398): n is a, c, g, or t
  misc_feature (792091)..(792145): n is a, c, g, or t
  misc_feature (802901)..(804169): n is a, c, g, or t
  misc_feature (809893)..(810581): n is a, c, g, or t
  misc_feature (829697)..(830088): n is a, c, g, or t
  misc_feature (839102)..(839544): n is a, c, g, or t
  misc_feature (856416)..(858025): n is a, c, g, or t
  misc_feature (860115)..(860189): n is a, c, g, or t
  misc_feature (865921)..(866397): n is a, c, g, or t
  misc_feature (869770)..(870306): n is a, c, g, or t
  misc_feature (876639)..(877649): n is a, c, g, or t
  misc_feature (878278)..(878287): n is a, c, g, or t
  misc_feature (879898)..(880497): n is a, c, g, or t
  misc_feature (882861)..(883526): n is a, c, g, or t
  misc_feature (897127)..(897493): n is a, c, g, or t
  misc_feature (907119)..(909188): n is a, c, g, or t
  misc_feature (911343)..(912717): n is a, c, g, or t
  misc_feature (912952)..(913061): n is a, c, g, or t
  misc_feature (914493)..(915066): n is a, c, g, or t
  misc_feature (923188)..(923881): n is a, c, g, or t
  misc_feature (925481)..(926037): n is a, c, g, or t
  misc_feature (930440)..(930801): n is a, c, g, or t
  misc_feature (931658)..(933889): n is a, c, g, or t
  misc_feature (936511)..(937358): n is a, c, g, or t
  misc_feature (939510)..(939654): n is a, c, g, or t
  misc_feature (939827)..(939906): n is a, c, g, or t
  misc_feature (946242)..(947327): n is a, c, g, or t
  misc_feature (961532)..(962740): n is a, c, g, or t
  misc_feature (964531)..(964779): n is a, c, g, or t
  misc_feature (975452)..(976077): n is a, c, g, or t
  misc_feature (983244)..(983707): n is a, c, g, or t
  misc_feature (989157)..(989799): n is a, c, g, or t
  misc_feature (990938)..(991624): n is a, c, g, or t
  misc_feature (997265)..(999041): n is a, c, g, or t
  misc_feature (1020842)..(1021574): n is a, c, g, or t
  misc_feature (1022415)..(1022557): n is a, c, g, or t
  misc_feature (1024274)..(1025443): n is a, c, g, or t
  misc_feature (1031529)..(1033776): n is a, c, g, or t
  misc_feature (1033954)..(1034032): n is a, c, g, or t
  misc_feature (1034816)..(1034988): n is a, c, g, or t
  misc_feature (1040900)..(1041153): n is a, c, g, or t
  misc_feature (1074341)..(1074431): n is a, c, g, or t
  misc_feature (1080116)..(1080125): n is a, c, g, or t
  misc_feature (1080362)..(1080371): n is a, c, g, or t
  misc_feature (1095295)..(1095620): n is a, c, g, or t
  misc_feature (1101180)..(1101594): n is a, c, g, or t
  misc_feature (1102339)..(1102348): n is a, c, g, or t
  misc_feature (1110942)..(1110969): n is a, c, g, or t
  misc_feature (1117480)..(1117990): n is a, c, g, or t
  misc_feature (1120804)..(1123126): n is a, c, g, or t
  misc_feature (1143972)..(1144313): n is a, c, g, or t
  misc_feature (1151192)..(1152475): n is a, c, g, or t
  misc_feature (1153102)..(1153111): n is a, c, g, or t
  misc_feature (1153617)..(1153865): n is a, c, g, or t
  misc_feature (1155709)..(1155758): n is a, c, g, or t
  misc_feature (1158522)..(1158531): n is a, c, g, or t
  misc_feature (1170856)..(1172293): n is a, c, g, or t
  misc_feature (1172884)..(1173370): n is a, c, g, or t
  misc_feature (1184055)..(1185127): n is a, c, g, or t
  misc_feature (1190752)..(1191855): n is a, c, g, or t
  misc_feature (1200527)..(1200536): n is a, c, g, or t
  misc_feature (1200889)..(1200898): n is a, c, g, or t
  misc_feature (1221024)..(1221432): n is a, c, g, or t
  misc_feature (1222861)..(1222870): n is a, c, g, or t
  misc_feature (1224656)..(1225681): n is a, c, g, or t
  misc_feature (1245418)..(1245783): n is a, c, g, or t
  misc_feature (1249796)..(1250194): n is a, c, g, or t
  misc_feature (1252636)..(1254178): n is a, c, g, or t
  misc_feature (1255378)..(1255846): n is a, c, g, or t
  misc_feature (1257955)..(1258538): n is a, c, g, or t
  misc_feature (1262087)..(1264127): n is a, c, g, or t
  misc_feature (1266690)..(1268328): n is a, c, g, or t
  misc_feature (1268877)..(1269003): n is a, c, g, or t
  misc_feature (1282450)..(1283203): n is a, c, g, or t
  misc_feature (1288372)..(1288728): n is a, c, g, or t
  misc_feature (1297510)..(1297767): n is a, c, g, or t
  misc_feature (1299724)..(1301110): n is a, c, g, or t
  misc_feature (1305101)..(1305150): n is a, c, g, or t
  misc_feature (1309095)..(1309611): n is a, c, g, or t
  misc_feature (1318211)..(1318947): n is a, c, g, or t
  misc_feature (1322619)..(1322744): n is a, c, g, or t
  misc_feature (1348102)..(1348474): n is a, c, g, or t
  misc_feature (1352501)..(1352943): n is a, c, g, or t
  misc_feature (1354621)..(1354774): n is a, c, g, or t
  misc_feature (1362656)..(1363450): n is a, c, g, or t
  misc_feature (1367790)..(1368985): n is a, c, g, or t
  misc_feature (1370912)..(1371029): n is a, c, g, or t
  misc_feature (1374882)..(1375767): n is a, c, g, or t
  misc_feature (1375960)..(1376100): n is a, c, g, or t
  misc_feature (1393648)..(1395156): n is a, c, g, or t
  misc_feature (1397732)..(1398531): n is a, c, g, or t
  misc_feature (1407648)..(1407657): n is a, c, g, or t
  misc_feature (1415010)..(1415019): n is a, c, g, or t
  misc_feature (1415930)..(1416491): n is a, c, g, or t
  misc_feature (1420611)..(1421073): n is a, c, g, or t
  misc_feature (1426324)..(1426619): n is a, c, g, or t
  misc_feature (1428357)..(1428668): n is a, c, g, or t
  misc_feature (1444669)..(1444973): n is a, c, g, or t
  misc_feature (1460964)..(1461594): n is a, c, g, or t
  misc_feature (1464267)..(1464714): n is a, c, g, or t
  misc_feature (1469137)..(1469423): n is a, c, g, or t
  misc_feature (1473195)..(1473391): n is a, c, g, or t
  misc_feature (1477673)..(1477706): n is a, c, g, or t
  misc_feature (1483515)..(1484088): n is a, c, g, or t
  misc_feature (1555148)..(1555956): n is a, c, g, or t
  misc_feature (1574703)..(1575413): n is a, c, g, or t
  misc_feature (1589190)..(1591200): n is a, c, g, or t
  misc_feature (1594682)..(1596954): n is a, c, g, or t
  misc_feature (1603796)..(1604242): n is a, c, g, or t
  misc_feature (1605596)..(1605786): n is a, c, g, or t
  misc_feature (1606253)..(1606282): n is a, c, g, or t
  misc_feature (1608438)..(1608557): n is a, c, g, or t
  misc_feature (1609603)..(1613745): n is a, c, g, or t
  misc_feature (1616409)..(1618272): n is a, c, g, or t
  misc_feature (1620025)..(1620597): n is a, c, g, or t
  misc_feature (1621416)..(1622682): n is a, c, g, or t
  misc_feature (1632346)..(1632978): n is a, c, g, or t
  misc_feature (1633936)..(1636026): n is a, c, g, or t
  misc_feature (1637788)..(1640216): n is a, c, g, or t
  misc_feature (1640653)..(1643204): n is a, c, g, or t
  misc_feature (1657650)..(1657910): n is a, c, g, or t
  misc_feature (1663857)..(1664019): n is a, c, g, or t
  misc_feature (1664989)..(1665555): n is a, c, g, or t
  misc_feature (1669028)..(1669244): n is a, c, g, or t
  misc_feature (1685271)..(1686112): n is a, c, g, or t
  misc_feature (1688353)..(1688818): n is a, c, g, or t
  misc_feature (1693037)..(1693488): n is a, c, g, or t
  misc_feature (1693933)..(1694565): n is a, c, g, or t
  misc_feature (1695194)..(1695827): n is a, c, g, or t
  misc_feature (1707962)..(1707971): n is a, c, g, or t
  misc_feature (1709898)..(1709907): n is a, c, g, or t
  misc_feature (1716225)..(1716390): n is a, c, g, or t
  misc_feature (1716754)..(1718987): n is a, c, g, or t
  misc_feature (1720718)..(1721262): n is a, c, g, or t
  misc_feature (1730594)..(1731998): n is a, c, g, or t
  misc_feature (1732590)..(1734112): n is a, c, g, or t
  misc_feature (1740261)..(1740270): n is a, c, g, or t
  misc_feature (1743079)..(1743239): n is a, c, g, or t
  misc_feature (1744581)..(1744630): n is a, c, g, or t
  misc_feature (1768653)..(1770248): n is a, c, g, or t
  misc_feature (1770710)..(1772190): n is a, c, g, or t
  misc_feature (1788124)..(1789201): n is a, c, g, or t
  misc_feature (1791581)..(1792888): n is a, c, g, or t
  misc_feature (1812878)..(1813866): n is a, c, g, or t
  misc_feature (1819052)..(1819061): n is a, c, g, or t
  misc_feature (1823073)..(1824431): n is a, c, g, or t
  misc_feature (1825005)..(1825245): n is a, c, g, or t
  misc_feature (1827954)..(1828476): n is a, c, g, or t
  misc_feature (1831380)..(1831579): n is a, c, g, or t
  misc_feature (1835023)..(1837091): n is a, c, g, or t
  misc_feature (1840609)..(1840948): n is a, c, g, or t
  misc_feature (1844813)..(1845036): n is a, c, g, or t
  misc_feature (1854295)..(1854416): n is a, c, g, or t
  misc_feature (1856501)..(1856588): n is a, c, g, or t
  misc_feature (1863506)..(1863926): n is a, c, g, or t
  misc_feature (1866705)..(1867810): n is a, c, g, or t
  misc_feature (1874510)..(1874863): n is a, c, g, or t
  misc_feature (1875643)..(1876059): n is a, c, g, or t
  misc_feature (1878768)..(1878777): n is a, c, g, or t
  misc_feature (1881011)..(1881388): n is a, c, g, or t
  misc_feature (1887638)..(1889502): n is a, c, g, or t
  misc_feature (1890225)..(1891769): n is a, c, g, or t
  misc_feature (1899292)..(1900230): n is a, c, g, or t
  misc_feature (1908104)..(1908478): n is a, c, g, or t
  misc_feature (1911624)..(1913098): n is a, c, g, or t
  misc_feature (1919518)..(1920058): n is a, c, g, or t
  misc_feature (1933905)..(1934811): n is a, c, g, or t
  misc_feature (1937882)..(1939872): n is a, c, g, or t
  misc_feature (1940618)..(1940876): n is a, c, g, or t
  misc_feature (1946072)..(1946765): n is a, c, g, or t
  misc_feature (1962922)..(1963258): n is a, c, g, or t
  misc_feature (1964099)..(1965853): n is a, c, g, or t
cttgaactcattaaagcaattgaccctgactaaagaaaataagaaagcgaaccatttttttttatcagcaaagataatattatatatatatatatatatatatatatatatatatatattaaagatgagtacaagtagtactcagaaagaaatacaccccagggaacctaccagaattttggcaacctaatacatggtaacagcctgaattaaggtgccaaagatcaacctaatagtaagctcacctgaaggcggtcacaaaataatacctcccctacttatagaacccatctctaatatggttagaccaataatagaagggaatattaaatcttttttccaaattaactaacatagaccaataaaagaataaaacattcttcaacagtttagatccattaaaaattttattatggaaaacaatcttgttacaatgaaaccaaatgttccatgtcaatgctatccaccaagcatatcacctttgaattttaaggccagtaacataacagtaacagtgttgaaggaagtgctcaataggagtaattggtaatgcccctaccacactgatccagcccaaagattcccatcacagcaacataatgttgtgacaactaaaaaacacatgtaatgcatccttaacacagctaccacaaaaaagacaactatgatcacccaaatttatgtgtctatggggcaattgatctctcagtaacctccaagcaaaacaagtggctttgtttggaatggcagtttcccaaggtttgtgtacacctccttctgagtctaaatctccacccctctgcttaaagtcttgtaagcactttccaccgtgtatctaccattcagggcaccctcccaccaactatcctactggtcaggatgtatggtcagatcctgaatttcctctaagaatttaattgcaatttcaacttcctcctccctaaagcaccttctccaattaagttttcattcccacccatcatgtgacagagatcccatttgctaaataaattgctgttgttgttgggagatgtggtacactctaggaaatttcgtcctcagaggtataccatcttccttccaaccatctttccaaaataatacctttgatccgcagccaaccctccatttagtttccttattaaaccacccctcctcaacactaggttggcatacactacaaaggtcccgccaccaaatagagtcactagtaggtcttctcgaagcatcaagatttcgccaactgtcatattttgactccaagacttgtgaccacaattccccttgacagtgaaacaagttccaccgcggttagttagctttaatttattttacatgcttcactagctggccataacaaactttgcaacgtaatgaatgtttaaactgttaattattgataattgataattttacaatgaactaacgagatactttccaacagactgcaagcctataaacaagaatcagaattctggcaatctacatacacaagtggtgaactgatttgacatccaagaagcagagcatttgaaacccttgggtaatccaaaacaaattgatgctatacaaaaaatctatttcaaccaatcagcagctgcccttccagcaaaataactaagaatttcaccaaaaagaaaacagatagcttaatggcaaactagtttaatcctacaaagtccaactggaagctggaatcccttgtttctggaaccaatcaggcatgtggaacttttcatagagcaaaggtcttacatcattctgctcagaaagttgcttgagaagtggaagaatgacatctagaagctgttacacatcaaaatagaggagatgatggtgagcaattcataaaagtatcagatgagtgatttattttattttaagcattggtggtcttaaatttcaatagcacagatctttgcacacctgggtgtcatgtggttgcccagcagaaaatggaatgcacggaattccattcaccggttgtaatacaaagctgaaaggattattgtctacaataacaatgcgacaaagatcctttgagatgcaggtaagatccttgacatgttcccgatattccctgcaatcaaacagcatttataagaatgcttgtacaaatccatccagcagaatccattctgaacttcaaactcaaacacatacaccccaaaataactttaaaaattccagaaatgatgcagatcatttaataacatttaaaaaactacaaagaaactcctcgcagactgaaaatactgtgaaaagaaacaataaaattttaagtttgtaatatcaatggtacatacaaaccagcctggtgtgaacaacagtcggttgttatgatttgttagcatgatttcagcagttgagtttatattgagcccaaaaagaaaaagtacatccaaattcaactgtgaccttgattatgcagaacatagttcagaactgagagaaatgcaaaagcgtagaaatttaatcccatgcattactcaagtggttatgatgggtggggatttgggtagagctctagagtttgggtgtggtaacaactccaattatatcaaaaatgaaatcatagacaaaacatccaaaagtcagtttggataaacttctcaacaaatatttacaggaaaagaaaatataatgaaccaaacttctcacataaactaaaatcattatatgcacttcaatttatgaagtttgatgaaagagttattgaaaaatttgaggtgcataagttgatttttaacatgagaagttagatcattctacctcgattcattttattttcttctctagaagtgcttaatgagaatatttgccaaactggctctctacagttttgtccctctcaaaaagattctggtaaaaccaacaaaagaatcaagacatttagccagaaaatccaaagcatgtaatccctcaggactttgaagatattacaaaagccatccaaatgttttttttctggggaaagcataacaacaaaaatgaccacaagatgtaccattcttcgagacttgtttacactctactaatttaagtaagatcacacacacacacacacacacacacacacacacatatctagtataaatgataaaataatatcataaacataaatatatagctggaaaagaaaaaaaaagaagacatttagaaacaattaaagagaataattgctgcacagttcttctataacagcacaaaactttcatccatttagctatgcagcacactgcagtcaaatttagcagatgctcataagctcattcggtccaaaagtgtccagcattattatatgaatgcaacaaatttgcaccaaatatcaatttttgttggtggtttatcagttttgtaaagattcaatgaccgaccctccaacttatagagaagataggcatagaccatgaaaacatgggctggtaccagaaaaacaaggaataaagaaccacaactaaaaataaaatgaactataatattaattcacatatagttggctggctatcagccatgaaaacagaaagattaattacataaaaacagaacactggattggaaacaaggtagatacacttacgtgctaattgttgagggccgataaagtcgtagactgaatcgattttccacatctattctgtcaacaaggggtctagcatagcctgtaagaatttataggcatatgtcattcagaaatgttgaacataattcccaaatgatgaatatgcacaagtacagcagcttagtattttgggacaaaccttcaagaccagctgtaaacagcaccatgtcagcaaattcactgagttgctttaaaaattccttcaacccagggcgttcaaatactgtaacataattgatttttttgccttctccttccttgaaaatccaacatggtcaagtgaggatataatattctagttgtcgacaagcaatcagatgcaaattacaaagtaacttaccttgtctatcgatacacattccagctcaaaccaattcaaaccaccttcgattgcttgagtccgtaaagcagctggcaaacttgatgtctcgtatgcacataccagtgtttcatctaagtccagcacaacctacaagtgcacatataagatcaaaatctacattagcaaaaggaaaagagaaagtaataaaagaaaattaatgacatcattaacattcttctaacagctcatcaatagaatacaccttataccacttctcattcttcttttctgactaacaaaaaaaaattcaaaccggtatgttttgcatgccaaatttgggcatttgcaagtgtgtgccaagggtaaatgtaaagacatggaaattaaaacaaaataacaactcaacgagagaatctacacgcaaatagcatggttgaaacatgtgtacatgaataaaactgagtcagattaagataaaaacgcagaaactacagtgtgtagcttctgcttggacacacgtaaatcttggaatccaaacatgtggtaaatatcaatgaggaagttttcgaaacacatcaccatatattacaatttacaagcaaactaaggaatcggtacagcagacagcaatataagaacaaatcataaatccctccatcataaaaatccaaaacacaaggggcttcaagctgaactgcatatgttgcaacaagagtgactcaactctctgaggcaagcaacagaaatcagtacacacaaccaaacccagaggacaagcttccacagtctcattccaaatgtccccaaacaagagaaagacatttctaatgttttgtcttctgtcttagatgcttccaaaaaccctttgagttcatggaagccaaccattttccactttgagcaagtcaacaagaccatcccaataaactttataaatatgcatgttcaagtaaaaccaaaaccaaaacgaaaccagaacatccagctaatgttcaagtttaaacaaaatccaaatacaaaaacaagaaaccaggaaactaaaaaaaaaaaaagggtacaaaacaataagacaacaacgaagttagaagtataacaaaagacaaaagcaaatcatcctcatccccgaaacacagattcacccgtataacacgcacagtgatctttatcaactacaaacaagtattcctattcacctccttagacatgcaaatttcagcatccttctcaaaccctactcagatcagagccaaagtcaaaagtttttattttttttacaaaaagacactaaaatcctgaaatgaaaaactgaagcactagttatattatcttcaacacatcaggaattaaccaattaatcctcgaacagaacaccttttttttctcttctcactgaacacaaaaacagagaaaataattaaaaaagaaaagaagtggttggttgctacggtaccgtgagttttgggacgggatgatcggcgggggaataatcaagtggtgagatttcgagggcggagagaggaggcgaatcgtgttcagcaagctcaacggagggaagaggtttgaaggaagaggaagaggaagaaacgtttgaagaagaggaagaagaattagaagagaaagagagtagaggatagtgacctaaggctcttataatctggaagaagatctgaaagaagaaggccaaccaactcaacagtgccctccacgcttgctgagtccgaggcgagtacacctccgcctgagtcaactcgcccatattccccaacacaaaaacctaaccaacgatcgatcgatcgatgcaaattgattattaatctcttgcgttgcgattgtgccgtgctgcttacggggtgtttcgattctctctctctcttttgcgtgtgagcgattttcagagagatgttgtggtcatggtggtgcttcgacgaggtctagagagagagagagagagagagagagagggaaaggaaaggaaaagggctacggagattgacgcacgcgctgcggttgcgcgtgaggtctttggtggcgcgttagtcagaaattgccttctagctttttgtgtattttggatgtttttgctttttctgcggtcatcattcattgactgcgcttaatagggtcgaaaatggaaatcaccttcttagtagtattgaattttatttgtgttatcaataagaattttagtccttaattcgagaacttaaacttaaaattagggattctctaaaaaaaattaaacatgaattctggaattaaattgattattcgctaaaaaataaaattaattgatttcataaactttaatgaaaccctacaaacttttaagttttaaggatttattttaatttattttaaactttagtggacaaaattagatgaaagctgaaaattaaaaaaatagttaaatgtttaaaattaaaaattaacttattaaataatattatttttaattttttatataaataatatagtgtaaatcatcaaaattaaagaaagtggtactcacatttaatattatcataatttaaattttatttcaaaaatattattaagtttaaatgtagtaagtgatagtatcatttaatattaaaactttaactttgaataagtttgaaaattagtcattgttgtttacggataaaagaaaaacaaatataaaataatcaaaaaaagtaaagtaacaaaaatatgatttatttaaaaaaaattaagaaatttgataaaatatattaaagataaaaaagaaaataaatattaaaaactataaattaaaaacaaatattttaaaaatactatttaattaacattaaaaattactaaaataatttatttattaaataactaaataattttgttgactaataactttttaaaaacaaattaaaatatcttcttcaacataatcttattttcaatactaatattacatcaagatacaaattagggagtaataaaaagcaacatatgcgggtaatgtatttaattaattaactagtgttttataaataatgcagggcagggatggttgataattgaggcaatgtccgaaaacgcgcagtgagggagcgtgaggggagaggatgttcatgattgtgatgaacaaatgataaataaagaatgagacaataagaaaagacaatctttgagtctttaaagacttcgtccttgttcttcaaattattaaattagaatttcagaataaattaaattagttggactcacagacacaacacgagtcaggatctgaaaacttaaaagattgttgtagcaattggttatgagagtgataaaattagaaactaaattatttttttgaacgttttttaatcacatttaactgtgtgcgaaaagctttagaagtatgtcatcacattcaaaataaataatgttgtaacaaattaaattagtcttattttgttttttaaaggtttaagaaatttgatataaatttactctttattcataaacaaatagatacgaaacaaccttgctgtttggtatttttatatgtgggaattaaaaatgatattaaaaggttataataatttgctcatttnnnnnnnnnnnnnnnnnnnnnnnnnnnnnnnnnnnnnnnnnnnnnnnnnnnnnnnnnnnnnnnnnnnnnnnnnnnnnnnnnnnnnnnnnnnnnnnnnnnnnnnnnnnnnnnnnnnnnnnnnnnnnnnnnnnnnnnnnnnnnnnnnnnnnnnnnnnnnnnnnnnnnnnnnnnnnnnnnnnnnnnnnnnnnnnnnnnnnnnnnnnnnnnnnnnnnnnnnnnnnnnnnnnnnnnnnnnnnnnnnnnnnnnnnnnnnnnnnnnnnnnnnnnnnnnnnnnnnnnnnnnnnnnnnnnnnnnnnnnnnnnnnnnnnnnnnnnnnnnnnnnnnnnnnnnnnnnnnnnnnnnnnnnnnnnnnnnnnnnnnnnnnnnnnnnnnnnnnnnnnnnnnnnnnnnnnnnnnnnnnnnnnnnnnnnnnnnnnnnnnnnnnnnnnnnnnnnnnnnnnnnnnnnnnnnnnnnnnnnnnnnnnnnnnnnnnnnnnnnnnnnnnnnnnnnnnnnnnnnnnnnnnnnnnnnnnnnnnnnnnnnnnnnnnnnnnnnnnnnnnnnnnnnnnnnnnnnnnnnnnnnnnnnnnnnnnnnnnnnnnnnnnnnnnnnnnnnnnnnnnnnnnnnnnnnnnnnnnnnnnnnnnnnnnnnnnnnnnnnnnnnnnnnctagttgaatgagaagaagtctcctcgtattttaaacatctataaattacaaatatttcatcaatagttttaattattttttatcattctttttctatcacattagtattaataaactcaatcacttatttcttctctctttctatctctctcaaggtataaacacttaagggataactatgaaaataattcgagttatatttggtgaaaagaggatcattattcattcttttgaatacactctttattattaccaaaaattattgaaaattacaacctttaatgaattttacttttcatttaatgaatcttttattttttaataaattttaactaatagtaagtaagtgtgttttttaaaaaaaatattttgaaagtatattgctgacacttctcattaattttgataacaaataaaaatgacttttgtatttcttatgttgaaatttaaaatttaaaatatacttattaaataaaaattaatttcaaaagagtatagtgtttaacttttttttttttaccgtattctcttgattaagttttagggttcgtttggtagagcaaaataaagtgaaaaatgaatgaaatgaacattgtacaatccacacttttacttgttactttaattcaaaacttttatctattttcatttcactctactaaatatacacttagacatgcaattattttaaatattcaaaaagatgattttattatttataataatcttatccaacttaaacataataataaaaaatacatgtgatctaaaaaaattgtttttttcttccgataaaaattaatgtagttagcaacacatcattaggggtgtaaaacaaaacaagtcagaccgaatcggattgtaactgactcgacgtgactctgtgtcttaactggattgtaacaaaaaaactatctcattttaaaaccaatttggatttgactcgtcctgattctccaaaagcaacaagtgacccgaaattgtgctgtgattttctctcttgtctctcctctcggcatagtctcgctctctctcgtgactcaatctcattgcttactctcactctcaatctcacaatcagtgaaccctaattgtggattcacttcattttgcgttttgatttgtttggcttcatttgaggattcaccgtaatgttcgaagaccctttttcgtttgtttcttgtgattttgcatttttctattgtttgactacccttttgagttttgatttgcatcgattgcatttggcttcatttgcatcgaagaatgtgattttaagaacttttgtggtggttttgacttgctttattattgttgggttgttgttaatattttaaaccaaataaatggtagttttggttcatcaattccctgatgttatgctgcaattgaattcttaaacaactttaattgtctgcatctaagttacattacatgatgatgatgtcttccaaaccaaatccaactcaattgtttttctgtctcaagtgaagtttaaaaagggaaacctagtatatcatgtggataaaatatatttcagttctactctcggacaagaattgtcgtgatgttttacaaaatacatgttcgatttgattggttcaggtacataaacttttccatttggccctattgacagtgctgaataattttgatattctatttacttatcttttattgagcctagaataagctttattctttgttttccttcaggttcgagttatgaaggatttgtatgacatgctttcaaaggtcaggttctattttttagattattttgtttaccttgtctatatttatggttggaatttcgtaacacaattttgaatttctttgagaattggtttgactttaagaaattgataggattagagacactaaatttaggtggatcaataacgtctttgtataacttctatttgctcatagtcatatatgtctaaatgaagagtgttggtcttttagtaagtggcatgataaattggtataataactttcacttagatgcttaatttattgaagctacataagagaagtacatcttctatataattttgtatttattttttgttataatcttttttattaagtgtttaaaatcaaatttcatgatggaaggaaaaaactttcatttttccaatccaaataaagtaaatttttttatataaaaaaatggttcaacatgttgtattagatatgagtagaagaatccaacttgatattctttaaaaaaaaagtttttaaaatcggttccattcttaaaatcaatttaaaatcggttcaaaaccaattctgtttcaaatcggttatcaaatgagttcgcgtattcagattaaaattgaatcagtttaactagttaaaatccaaataatccaatgtgaatatcaaattagcaataaataaaaaatgatttttttgttgataaataaatattcaatttttgaaacatcatttgttatatacaagactagaaaaatttagtaaaagtaaagcgaacatgattttttttataatttttatatgatatttttttatgaaatatttttagttccatatttttaagcataattgataataacnnnnnnnnnnnnnnnnnnnnnnnnnnnnnnnnnnnnnnnnnnnnnnnnnnnnnnnnnnnnnnnnnnnnnnnnnnnnnnnnnnnnnnnnnnnnnnnnnnnnnnnnnnnnnnnnnnnnnnnnnnnnnnnnnnnnnnnnnnnnnnnnnnnnnnnnnnnnnnnnnnnnnnnnnnnnnnnnnnnnnnnnnnnnnnnnnnnnnnnnnnnnnnnnnnnnnnnnnnnnnnnnnnnnnnnnnnnnnnnnnnnnnnnnnnnnnnnnnnnnnnnnnnnnnnnnnnnnnnnnnnnnnnnnnnnnnnnnnnnnnnnnnnnnnnnnnnnnnnnnnnnnnnnnnnnnnnnnnnnnnnnnnnnnnnnnnnnnnnnnnnnnnnnnnnnnnnnnnnnnnnnnnnnnnnnnnnnnnnnnnnnnnnnnnnnnnnnnnnnnnnnnnnnnnnnnnnnnnnnnnnnnnnnnnnnnnnnnnnnnnnnnnnnnnnnnnnnnnnnnnnnnnnnnnnnnnnnnnnnnnnnnnnnnnnnnnnnnnnnnnnnnnnnnnnnnnnnnnnnnnnnnnnnnnnnnnnnnnnnnnnnnnnnnnnnnnnnnnnnnnnnnnnnnnnnnnnnnnnnnnnnnnnnnnnnnnnnnnnnnnnnnnnnnnnnnnnnnnnnnnnnnnnnnnnnnnnnnnnnnnnnnnnnnnnnnnnnnnnnnnnnnnnnnnnnnnnnnnnnnnnnnnnnnnnnnnnnnnnnnnnnnnnnnnnnnnnnnnnnnnnnnnnnnnnnnnnnnnnnnnnnnnnnnnnnnnnnnnnnnnnnnnnnnnnnnnnnnnnnnnnnnnnnnnnnnnnnnnnnnnnnnnnnnnnnnnnnnnnnnnnnnnnnnnnnnnnnnnnnnnnnnnnnnnnnnnnnnnnnnnnnnnnnnnnnnnnnnnnnnnnnnnnnnnnnnnnnnnnnnnnnnnnnnnnnnnnnnnnnnnnnnnnnnnnnnnnnnnnnnnnnnnnnnnnnnnnnnnnnnnnnnnnnnnnnnnnnnnnnnnnnnnnnnnnnnnnnnnnnnnnnnnnnnnnnnnnnnnnnnnnnnnnnnnnnnnnnnnnnnnnnnnnnnnnnnnnnnnnnnnataacataatagatgttcataaaatattttcattgaaaaattctccaaaatgtcacacatccgtattattccttctagacttatatataaacaaaaataattaatttcacaataattaatttaattttattaatatcaaataaaaaataaatttatttctaaaatatccgttattggaatgtattatcatgaataaaaaacttcattgaaaatagaattataattaaatgaaaaatatttttaaaaaaataattaaaattatatatatttaaattaaagatattttttatttatttatatgcaattctaagaataactcataaatgaagtatgtgttttctgttccatcagcggtcaacgttgttggtaattggatcagacttgaatgcagtggacagtggtgccatcaagatcttatttatagtatggtcgttggaaatcattaaaatggtagatatgtcactatttatgactcaaaactgaaaacatcagcttcctttctcaattagtactaatacattctttcttttctcgtttagcctcgaattttcacgttgtatttctttaaattttaaattaatattttttattttaatttatagtactttttttgttatcttacttaatatttgtgtataaatgaaaaaaatcacaatttagtaataattttttattaattagttattttcaagttttataaattaaataattaaaacatatgttttatatttaattttttatcgctaataaaaaaaatctttctacttttgatataatattcttatatatatatatatatatattataaaaaaatatttcatttgttagaaaaatatttaactcatcaactcacgacagatcatttcattgagttaggttattaatttttatagtattatataacttatttaataagcaagtcaagttaaagtgaatcattttttaaaaaccatgcattttttaaaaaatatgcgacgaattaattcatcatctcttgtttgtttaaatgaaagagaattaaaaatgagtgaaatgaataacaaaatgagataggatttatatttttacactcaattttaaggtcaattttagggtggaccacttgataagtgattcaaaagaatcataattcttaatcattagatcaatcttattactataggtatgttcacactaaatcccctgaacctttgtcgcaactcccttgaccacattcactgatgtcagtcgacgacgacgtttttctccttccttacctccacactgtctctcttttctctgacaatctcttcagctttgtttttcctttcccttgccaggacttctaccataaggggtcgatgtgtggatagatccacactgacaccaatgccccaaaaaatcttacatttctattttcttttacaggttaaagtgttttcaccacaaaagaggagcatggagagaaatttggagctacaaatgtcactgtgagattcatacatgaacagttgaaaccgtcagagccttacccagatatgtttctcattgtgatagttattgcttttgttcttaacccaagacctagattcatacctagatcaacttgtgagtgatagggagactaacataaaagagaagcatagacaaatagacgatagtgaaaggggaacatgcagtgacgacgaaattgttgtctcgttgctcttgatggacttggcatctatgttgagattgtacccgggaggcccacccgagccaatctactttttcaaccgcaaagaaatggaacaagaaattagggaagggaagggaatgaacaagtgctcctttgggttgataaatgcaactttattagccagtgtggatgtgaatgggcttgcggatgcgatggtgacgtacaaggggctgttggagaatgggatggggaggtgatagttgttgtcgtcactggaggagtcttcatggagaatagagaggaggtgggaggggtccaaggtgggggtcatggattttgaaacaccttcggcgatagatatcagtgatcgaaaaaacttgttaggaggagattgaaagatccagtgtaaactgacttatgataacaaatcaatctaatagctgacagttattgtccataataggactgccttaataggtggtccacttaagtaatggtcctactttaattcaaattttatctcaattcattttcatttaatttaatttcattccaccaaacactattagataagtaaggttgacttactttgatatcacaatttagaacaagttatcattcttacgaggccatgcctaaaactgttagattttatgggctaggcccaggcctcctttgaatgtttacttaccaaaaattggtctagtgattcagtcactaacatcccccttaatgcgtggggattttcttcctgtagccaacatatttcttcatatatccagtagagaggaaaaaaatcaaaaatacctttacgtatagtcgatagggattggcaatccgtaattaaacctataatttttatttaaaatttatatatgaaaaaaaatacattgttagatcaaaattaattattacaaaatttattatgtaaacttatatgtgtaaaaaattttcatatcatgaataataataataaaaaatttataatagaaaaatgatagaaatcattacttggattaatgggtaggtaataaaatgactcaaaataaaatatatgatttagaatattaagtgggaaaatgtctttatactaactttttttttatattatataaatatacatgtatttattttcatttattttaaatgatccttttctttacattttataaaattataattatacttattttcatttatcttatttttaaaaaatttctgttgacagaattttaaaaaacttatactaatatatttgtaaaatctattttaaatttgtatattattaatgcttatccacagaatgaaaatttcaaaaataatttaaataaaataaacaagtaaaataaaaatttatttaaatttcaaaaaaaggaataatatttttttaaaaatgaagagaattaatgactgaaatttaagatgaaagagaaaattttaataaagaaaaatcaaaagtaatttaatctatgatttgattgaaaaaattgaatgtaaaagaaaatataaaaacaattaataattaaaatttaaaaatatattgtaaagcaagtgataaataataatgaattcatgttataagaaagaaaaagaaataatagaggatcttcacgtttaagtgtgatttttcttaataattatagaaataaggtttaaatatctaaactgatgtcaatcaaattacttgagcctctcatcactagctcaatctaagagaacttacatttataaaataataaagtctggcatttgaattggcagcaccgatcacttagaaagttccattgtttttgtaatgaaactatattaatccaaatcctgtgaattcatggaacccctgtattatgtgacatgatgttaggacttagaaccaaatggggtgacattaaaatgttattatgataacctcccaattcatggaaggcaaaaaaataatgggaagaaattctgtacaaagaacaaactgtaaatcaacaggcaaaaaaaatatacagcatgagacagtgaattcacttggtgtagtttataaacaaaccaaaattgtgattgcaagctttgctatatgtggaaaataaattttagagatcacgactgatgaggataactccaatagaattactgaactctccaccagagaaaggactagtaaccataggaaagccatggatgcctcagtgcttgtcttgcagtaggccttcttttggggttgatgctaagtaagtatctgacgaagtcgataaacatagtatcagtgacctgtaggtgctgctccaatgatgactcttcttgaattatgtactccagttgatcagtctcctgtgcaatgtgtacaatgttaaagattagatggaaagaactaaaatgaaatttagaaggaggattcaaattcaaattatgctgatgcatcaaaggcctttatttttcttccctttattgtgcataactagtacttgtgtatattcccctttcatttactctactttctcactcaaaatagacatactaatccatctgagcttttcttcacataaactttacccttctcgttcatatattctgaaaaaggtagtggattttcattggctgcctttggcaaatttgaaattggccacaatgtggtttgataagaatataggattcttttggtaagagtataagatttaatcagtgctcataaaaaaataaaaaaaaatgaagaaagatgtactgcattcttgtgttaattagatcatagcatgctcatacttctagaaacaagaagagaactttttcctgctttttctttcaaataaatgagtcaatatgacctgtattcagaagcgagaagaaagtgtttttttcacctatgatttcattaaaaaaacaataaatcttataaaaaaaaggaacagctatgaagagaaaaaatagggggaacaaacctcatttacataataaatatcatattctttggtgaaatacttgtgcgtttcttgcccttttaccaacatctccatatcaatagaaccaagcattccaatcatgcgtgctagaatcatcacaactgcatcatttggaaacagcacctgcagaagacataagaattccggatgagtaaataacaaaaaattctttgaaattatttttattcctcaattatattagcttaccaaaaagaaaacctgattaaaactatatgaattttttttccatgctcatgttaaagccatagaaaaatgtatttcatgaatatcataaaaaaggcaaataagaacatacttcaccagagcataactctgccaagatacagccgagagaccatatatcaatcttttcatcatattgaaggcctaacatcacttcaggagctctataggatcgggattgtacatatagacacaaattgtctgtttggaagcaactgcttcctagatcaataacctttatctcacatcttctgtaacttttgattagaatgttctctggcttcaggtcacagtgaacaattcccaagctatgcaagtattgcaatgcttccaaacattggcgagtaatgagctgaatgaaaataaggataacaacaaccctgatcatttagacaactctatatctgacaagaagcaattctacacaaatagctgaattaactatctcacaatggataggcaatgtattaatagaagccacatattgctgaggatcataggtttgaaggatcaagggtgctttagacagctaactttagcaatataaagactgaataagtaatcatgtgcaagagtacaaaaattattgttctgtttgaacaaacctgcaatctgttcaacgtaaaatattcttcccctccagattcttggttgaacttctgaaattcgtataggtttgcttgcagaagttcagttacaatgaataaatgctcctgtgaagttttaattcaaggtgaatttagactaaatgggatgggagaagatatagtaagaaatgttaatcataaatttccactagatcattctaaaagctatataaaaaggatttatttgagctcttgctctatagtccaaagtttccctgttaagcacgtattaattcacaaatattttggatatagcttgacctaaacatttcgatcacttaatgaaatcaattcagcagcatatgacatacctgatggtagaaataatcataaaggcgcaaaatgtggtgttgatctgttgggtcatgcttattgacaagtttcagaagcttgatttcatctaagctttgatcaaaaaagtctttgtcatttttaataatcttcaagcaaacatctattcctgtctgaagatcatgtgcctgaacaaccctactgaaggcagctgaaccaagatattctgttacataataccttccagccaagactgtatttagcacaatgggaagttccttgttttcttcaaatccagtcctgtatatgcaataatggacgagagcaaattatactcaaataaataaattatactcaaatacaatgcaagtctatttaaaatacctaaagagccaaagtgaaaaaccaaaattcaaattccacaataaataaatactgagtcaaaatcaccatgcaattagttaaagccaacaaagaaaaagttgacggctcaaaaataagaaaagtaaaagccaataaagttgcatttaatttcaaaatttactaactcgtgatctcctacacattcaaaatcaactcattcaccagcattaacaggaatatttggcagaaatgtaagttcaggatacaagatcatctttcaagcaaacctgttctttctgtgtataattctcagatcaaatacttcgtattcttcctcttgagtatactttaagagctcatcatcagtagtatcctctccatctgcagtaatctctggatcttggcactcttcagctaattctccaccatctcgtgctttataggtgtcaagtccatttggtagatctttttgattaactttgatagttaagtcatatggaccattgtactccttactgctggcatttttagtgtagtagtcaaaactttgattcacagttagctctgaagtagagtcaaaagagttaatgtccccaacaaccttcaaatgaaaaccattcagatggatttccttcaaattagggtagccgaagtttgtaggatccaaactgcaagaaccacctgaacctggactgcttttgcaaaatggaacttcacaactacaggcaacagtgtgtttctcagccttgcactctaattccccttcaaacaagttgttgttatcaacatgacaatactctttcgaataagtaacatttccatcccttacagaggaatgattataaaggcatgccttgtccatgtaaccaccattaccatttccctttaatagaaattcttcagagttgtaaacaaggtccagagaattgtcatgctgattttccgtttctgctgtcatgacaaacttatcttcactttgacacgcaaagaaatctggcccttcaaaactaggagtcatgaaatagtcatcatctttttcattataccaatatggttcattctgcatttcaaaatcatgataatcacgtgcagtgccaaactgagataatctttcagacgaagatgcagagtcattctgagtctgagacgaggaatgaattccatacggatttatgaattctgcaaaaacaactaggttttaggatgctctattctctgagataggtgaatgacaccactaaactaaactgatatttttcggaattataacaaaagttgaatattagcatttttgtgtgtgtacgaaactcaatattttactagagaacaatcctgttcacgccggataggaccactgtgttgcatcccctaagttcagatcataatgactagaattactggatacagcatgtagcatgcaatcgagttgtgatcaacaaaaccaaacactcgaattcaaatttggatgataaatttatatgatccaaatatacaaattaaaaacattaaaagaaagcatccgattcaagaatagtagctgaaaaacacagtaactaactgttaacgtctccgttacttcgaacagatgatcaccaatcactgatcaacacatgcaattgatcactagcactaaacaatttgatttgaatttgaatagtagctttcaactttggagtacctgaagaagaaacacgagaagtgggagaaccgatgctgacgaactcatcggagctggatttggagcagttgccgccggaggagagctcggatggccgggagaaggatcggactctgaccggcggcggcggcgggaccatggggaagaagaacttctcgtagtcgaagtttccgaggtcggtgttctcgatgatgtcttgtcggagagcggactcagcttccgacaagccattcttgcgcagaaaatctaacactgcttcgacgccgttggacacagccatggacacgacaagaccaactcagaaacgttgttgttgctgattaaggagggcagtgacatgtgaattaagaaacacggaagggacaaaagcgtaataaaacgcatggtttatgatgtgcatgctctggtaatggttgcaagagagagaatgaaggtgagattctgcgtgtctctctttctctctctctttgtttttctgtgtaaaacataagccaaaccaggggtgcctatgtcttaccaactttgaaaagagagagaataaaactttgtgagaggttactgtttggtgggtccagagacgttatgaattgttcgatttgacacgtgtagtcatgatggacgtccacgtcacggactgttttttttttttctcttttatggtgagaagtcaacatggcatgggaccatcgcgttttgctttttttttttttttttttttttttnnnnnnnnnnnnnnnnnnnnnnnnnnnnnnnnnnnnnnnnnnnnnnnnnnnnnnnnnnnnnnnnnnnnnnnnnnnnnnnnnnnnnnnnnnnnnnnnnnnnnnnnnnnnnnnnnnnnnnnnnnnnnnnnnnnnnnnnnnnnnnnnnnnnnnnnnnnnnnnnnnnnnnnnnnnnnnnnnnnnnnnnnnnnnnnnnnnnnnnnnnnnnnnnnnnnnnnnnnnnnnnnnnnnnnnnnnnnnnnnntaattgtgattttaagataactatcataaaaaaaaaaaattcacggtttgtaatggaatgttacaatattagtggatgtattacttttttggttagaacaaatgaagataatcaagatatagatagttattattggattatgttcagccgccttaaaaatcttccttataatcttggaatttttatgatcgtttgattgtaaaacatttgaaatgagcagcattcagaataactggaccattaaaaagtccaatgaattaatagaatcaaatcgattgccgacatggacaaaatgctttcataagcaaatgtggctggaggctgtggcgcaaagaaactactccaagaagtggtcatagagattagagagtagtatttttcttttccgttttgcatatatggataactcaccacccgattttagaatggatatgttttggagaatatgttatgatataattatgattgtgattattataaattaaaagagagagagaattcagaaagaagcaaagattaataaaattagtaggaccacacgcacatgttcaatcttaagagtaaattgaacttttttactggtgtaacctacttttgattagggggtcaataatcaatagcttagacccaccatataccataatgttgtttcacaattctatatatgaaactgagtcgccacccactcctttcttttccaggttgatcagtcaccacaccacactcaccatggcatgtagaatcattaacctcttttccctcctttcatttgttccctttacaattattgttctcctcaccctcctttttgttttctttttaacctttttttttcttcttctatttttctctccggccctggacaacatttgaatttcaaacgagttgcccgttagtgaggccacacacgaaacatgccaagttcttaaaaaatatgtcacttttatgttaatttaagaggatgagtgccaggttgtacatatattgcatggttgaagctcaaagcatatagcgttagcttaacttccaaataaatgtaacaggtgaaaaatttagtctagtcagttatgatttgtgaaaaaaagtggtctaatttataacatcagcaattcagcatcaatctttagatttcttctataaattgcacaaaacctagactaaatataggcagtaatccataaatgggatgccaaagttgttggcagtgtcacttcttaggttaatagtattaatatgtaatttcatggtttaaaagctcatgaacttcaaaatataatcaaatagggtgcaaaaatgtaaattttgttatgttacttgtaatgttggaaaagggttattactctccattgtcaatatttgattgcgtctttgtatggacaagaccccgacctaaatggtaaagtataatgacataatccctaacaaaataattgacttttattttctctcccacttttaaaaaccgagagcatttcaattaggggccatgggaatatagtataacataaccaacgtatacacaacaaagaaaaagaaacaattgtttgagtcattctctgtccctcagatccatttgaaagtgaatattttaaagcgcgtagaatcactatttatgatgatcatttttttttggttttattataccataaattaatttatgttgctgataatgggggctttgtgcttagttaatacttaatactttaacagctatcctgattcctgaattcccacgtatgactacactaatgattatcaacattggaggtatcttcagatgcccatgttctgaagcaccttgcggagattgaggagtggaagaaaatagagcaaagaattgatagcttcctaatcccattcaaaatgaaagtgactcaaggaatagtagaagaccaacaaaaaaaaattagaaaataatattgggtaatgattgctgcttaatgtctaatcagtgattacaattttgaggtataattaattagttatcatcatgaccccccctcccccccttcccaagagatgagatcaaagaatggatcactcctaattgacaattgtataaattagaattatgtttatttgcgttttccctaagaaaacattataataattatttaatttgatgaataaaaactttaaatattttttcaacgcgttaatatatcaagttttaaaaattatatatgtaactatacatgtgtaataaaatcacattttttttatacacatgcagaagaaattagatatataaacttttccccaataagttaattcaaattcaacatattgaaatgaaaattgttgaacagaagttttacataaaaatttaagggcgtgtttgatttcattaaatattttgtgtttgtttctatttttatttttaatgataataataaataggaaaaattttgttatttttttatacaaatatttaaaaacattaaaataaaataaacataagataatactgttggtaataaaaatgatttttttccatattttttcaaatcaaatcaacggcaaggtgatgattgagagactgaaggcttaattctgaaggcccaagtcaaaacataaacatttaaaataaataatgccccatgagttgaattaaatattttgagcgagattactattcacattatcagtttctattttcacctccacttgctgaaatttttcttatttctgaaaatatgattctgtcgtacatttcatacttgttgcgcccctctcattaatatattacaaatatgttttcattgcgtatctaataaaagtgtataacaaaaatgtgtttgcctggggtatcttggtgagatacacaagcaaaatgtgctttcattatctcagtaacacactaatagtgggtcgaaccattatgaccacagtaggcccattagaaagacttccagcccatattgctgaaagacttccagcagaaaagaatgggcctttttatcatttagttgttgttgggtttttattacagtttccaccctagctaggtatattaagtgatttgtattcctgatacttattatgaaatgaattatgcatctttttcttagtagttgtagttgtagtgtagcctttaccgtgctttaccctaatttagctagtagcactttatcacatacactatggagtcccatttctgttgtgcacaaatcaacggaaatgtgattccgttgtgtataaacacaagcaaaaaaaaatgcacctctcacaaaggctatgaagacaaagaaataaggtggtggggaaaaagggtaaaagaagtgaagtaggagatgagggtgtgaagatggaagcaggtgaaagagaaggaggaggggtgggggtgagggaaactggcaacaggggtagtttcatcctttaaactgaatctaaaaaagtaggggggcgggtgaatagtagtgtcatggtgagaataacaactccctttttgagcccatgaggcccaagtaagtttcaaaccttccaagttccaagcaatatttcaaatgcaacatgtccacttcatttgtatgtgatggaagccagacgtctcccacatctgtgatttctgtaaccacagatttgggcttaggaatgtgctcctctcctaccagcaatcaatctaagaaaccttccactcaatatacaatggagcctccaaaggaaatctcaagttccttttcttcaaaatttagtgttgctggtggaaatatcttgaaacacatccatcccagccttttaacctttttttttttattaaaaaaatagacttttggggacaagttgatgcaagaaatcccaaaattctttttgatgtccttaacaagaaggttagctggcaagatgaagcctcaagtattatcagcagaacaatagctgactgccatgcaaaaagggttggagcaaatcaaaggggtgatgtgtggatgaattttgtgggacttgataggaatggtaaaaagaaagttgctgtttctctagttaagttcttgtaaggaagccgggataattttattttgtggatctttgttctgaagaaatgagcgaatgcaatgtgaaattcagagggaagactactcttgattttattgtgggtgagttttgcaagaaacgcttctctgtggtcttccttgaaaatgtagacaaggctgatgtgttggttcaaaatagtttgtcccaagccatcaagaccagaaagcttattcactcacacggacgagaagttggtgtaaacaatgcaatatttgtgacttctttctctggtcaccaaacaaaggatccttacaactattctgaggaaagaatagcaaaggtaaaagtgaagcctatcaaaataacagttgaacatgtgagtggagacatcagaagccaaagtgttagtgtggctgatggttcaatagagagcatttccaatctaattttagtaaataaacttaagttcattggccataatgaattttatgatcagcatttaacctcagacacggctaaaagtgcacatacaacatcaaattggtatttagatttgaatcttccagctgaaaagacactgaaatggaagatggaaacttggaacatgcgtcaactgagaaccaaaacctttggttgcaagatttgtatgaccaggttgatgaaacagtggtttttaaaccttttaattttgatgcacttgcggatagagtggtgaaagttatgacaagtagcttccacaaaactattggatcagagtgtgccttacagatagagtcagaagtcatggaccaattgcttgcagctgcatatgactcagacagaggtaaagacgttgaaaatttggtagaagaagttctctgtggaggatttacagaagtacagagaaggcacaaccttactgctagttccattgtgaaacttgttacatgttcgcatcaagcatcaagtgaataccttcttccaagtattacaatggaatgaattcctgttagagaaaatgttgttccaatttggatgtataatttagctgtagcacatagttaaacttattctagcctatacaactatagtttttctgtttttttataatctaaatgaccaagttataattgcaaatactatgtaatactcagctagtggtttgtgtgactttccttgcatagtaaaatcaataatcttctttacactgaaggaaaaatataatcaaatgtcttctagaatcttgtaacaaaaaaaatacccctatttcgacaattttctgccgttcgacttttacaagtgaagaaacaattaaaccaaagactagtcgctagccaaaggacattaaatcatgaatgaatgggatagaatggtatgcagtaatatgaaatgaaatctgcttgattattctcttattcattctaaccctttcagcccttgtatgcttgtacagaacgaaaaatcttactatttgtataatttaatacgtatttttttttttaaagtaatgatgtgtatataataaacaaggagggcactgaagccttacatcagcaacaatgtcaacaagatgtgatacttgtttgagatcatagataaaaacttttttgttacttaaaaatattttaatttattaaaaagtatatggtcaatgtttaataatagatattttttacatgaaaataatttttttcattagtatatataatccaatcatttttaaatatatttaataaaatttaactttcactattttattaataaatttaaaatagggataatgatacaatataaaattttattatagtttgattcaatattaatataattacctannnnnnnnnnnnnnnnnnnnnnnnnnnnnnnnnnnnnnnnnnnnnnnnnnnnnnnnnnnnnnnnnnnnnnnnnnnnnnnnnnnnnnnnnnnnnnnnnnnnnnnnnnnnnnnnnnnnnnnnnnnnnnnnnnnnnnnnnnnnnnnnnnnnnnnnnnnnnnnnnnnnnnnnnnnnnnnnnnnnnnnnnnnnnnnnnnntgaacttatatgtgctaagaaataacatttttagatacaatatttttaggatgtgatttccgaaaatgtaaaaatattccattaaataaacactccctatagtcagttagccacatatctattttttttgactgaatgtatctttcttgtcttgtaataagtgtttatgaattttcatgtcaaattaaatccattgttctcttaattggtcatcaacccaagaataatttttaatttccttaattattttactcgatacttaaatttccacaaattaatgttacatataataatatatttataaatcaccaatatattaacattaattaaaataatttaaaaataaaatataaacatttatatttttaaaaaataatatttcagatatatatatatatatatataaatgtataatttatgagatatttattagtcataagaaaaaatattaaatgatattttcatttttaaacggagtgcattgattaacctcattaaaaaaatgggcagctttcattttcaagcacgtgttgtttgacaaatttttcacttttttgaagaaatttatttccggcgtgcgtgttagaaacaactgcctcaaaaacaaaggcaggtgacggagcaactcaaatcatgtttgtccacttgacacgaactgaagttaccccttatgtctccaaattcttatgcctcgtctttataacctctacgaaatttcattcaaagagcctgtaagctgcaacaaaatttttggtaatatactcttgagacttgtcaaagaccttctaaaagttgttttttatccgtgagaatggaaaacattctatccagataattatgaagaattaagaaagtaatatgaattactaggtgaataagtgaatgtctgtgtgcacgagttctaaaaatggtgcttccttcatttaaagatgaccaatgttttaacattttaaacttttaattgaaaggataaattaaaattttctctctaaaaataaacaaaaggaataaaattatcttgataaaatatgtcatgcaatatgagtactgtagaataaaatatttatattttaattcaaattaatgtaaattgaatatatacatgcaatatgtatattggatatatgaatgtaaccaattagccacttaacttacgacatcatcacttcttttaattcatataaactaaaattaatcaatagaccaacataactaattaattatagagtcttactagtactttaacataattcagctggcaaacaggaagttaacacattagtttgtgatttgagttaggttgaaatagaatcccagaatacattctaacttaatttgtccaacatgatagttaccacccctaatataagccattaaaatttggccactcgatccgttcatgtgcgctgtggttcccagtagggtatgtaaagagctttttcctattaattacttacatcttgtgactgattctctaatgtgatttgaatggctaaattttagacaatgacaacgtttattcaatgaataaatataattaaaaaatatttgtcgccacgaatattttaagaacaaatatttgtatgatattggttaaaaaaataaatatttattgtggaaattatagaataacataaaaaattatgaataataaaatttttcgtctttcaataaaaatatttttattttaaattttaaattttatttttaagatactaattaatatttatctttttttaatgagaaatactaataatatactctttataattcactgaaacttattgaaaattatatttttttatgagttttacttgttatctaatgaatttttttgattttatagtctttaataaattctaattaataataaaataagtgtaaaaaaatgtgttagagagtatattaatgggatttgtttttatcaccagtaatgaaattttaaagtgacatctttctattcgttgagattgatatgtaatcgaaagcgacgaaaattatgtcaaatatgttgttaatatatggcagtggcgctaccttttcaaacttcgcgtaggcacctacctagcacctctattagaattagaaatacgtacttcacgacatcatagacgaaaatatagttaatcaacatatcgctttcatgtcttaattttcgttaaatgtacttaatctgccacttgttccagttcactcaagtggaacaaattgtgtagggaaagatcagaatccaaagaaggtattacttttcttacttgacaagacgaatgaaaggtttaccccgcataaccgacggcttggattattggataaccatgcattatttgtcactcaattttatgccatgatgccgacattattaaactaccattcagatttcagagttcatcacactactataaaaattatattttacgatgtcaaatcaatgatgacaatttttttataaataggagcatacaaatgataacggttgtatcaaaatcgtcgtagaattcactcaccctcatcatggttgccctcactcaactcgtgcccgtgccttacctcatagtcgccaccatcgaagtgtctccattgtcgcgttttcctccattgtccccaaagcgcttcccttatcttgtccctcccttctctctttctccctcttcccaaatccctcatttctctccacgtgtcgtcgtaccttcgtcgttcaagccgatcccaaaacggcgtcgacatcgtccccatacactacgactttgacctcttcaccatcgacgccaacagcgacgacgtccgagccgctcgcttcgctgccaaatacggtgcttccgtcgccatctgcgaacttcctttctccatcatctcctataaaatcaccggaggcgtcggcgaaacatgagtttatgattttcaatgtttttcaatttcgctttttattgaactagggtttgccattgtggaggccagtgaaacagagtttcgtgtttctgaagactggttcggtagggttcaggctaaccaagctttttcaacaagctaatttgtagaagctcatttgtttgatatattctaatggatagcattctatcattggttctacttattcttaatagttttcaatttaatagttccccacttcccatacatctcttttgctacgctattagtccattgttcaggaacatcattgaattataaatttatatatccatattaaagtaaagagctattatagtgaaagcacattgttcccaacttctattttatttattttaacgtgtcctgaatatcagaattggtttctgatagaacataataacattatttgatccatttagtttatctactgggaagggcttttagggtggtagtttgtatattttgaatgcccctctaatcccatatatattttccaacttttttgcacttgataactcttgaaaaaagcttcaggtgtatgaaacacatgcccgattggcattggaatttggggacctgtttgagtataatcaggtttgttctgtatattttttttgaagaaaaaagacttttatgttttaattcattttagtctttgattgcttttttttactcgtttttgcttgttatgcatttgtttcatttttttttcctgagatcaaggattaatatacttcattaaaggcaaccaatgctatgaagtggtgaattataacttcaatcaacgtgtaaactttggtcccatttttgcttgttttggaaataggaatgatttattatagaagttgaggatgttatttgtaattggactttagatattgacgctatttgtgtgaatgtagtgccaatctcagttacaaactctttatgccggaggcattgaggggtccgatatggattttgctgcttacaacttgctgtgtgtcataatgcattcaaataataacagagatcttgtattatcaatggcaaggttaaccccatacttacatgcttacttgactctcttttttcaaaaaaactgttagaactgaattatgtcatgtgattcatctatttgaatttcgtgatattattgttaaaatcttcattgttgaaagttactagattgagccattttggagttatattcccataaacatgctttaataattatattatgtttcacctatcagaatatttgtgctaatattattataatctgcactgttggaattttctagtttgggttctttgggagttctgttccctgaaaaatacgttgataatttggaacatgttaatgagaatttagaaaatggtttgtgagggaaaggctcaaattggtggctatttgggacctttgggtccttgggtggaaatcagtgattctcaggtcctgataagaaaaatagagaattggatcaatatatatcaagtctttcaatgactatacataaatatatttccttgaattattgtgataatagtataatgatgtagtctcaattattttgtcatgttatcatagaatgtcatgaatttgaatgtctagtgtttgtcaatactaggttatctcacgaagcaaagaaggatgaagctgtaaaacatgcccttatcgtttgtgctgctgtaacttcaacaaattatattgcattctttagactgtacaaaacagctcctaacttaaacacctgccttatgggtgagtatttttagttaactggtttttgtagcttgttagtaacacgtaacatatatgtcaagggggataaactgaaatgatttttttaatatccacaaatctctatgttgaaaagatgcgttataaggatgtgaactacatgtgttgatcatatcgcccaactctacctgtttcatacatttataaggtttttgggttttcaactggcgtggccacaaatggagcaagtgatgagagagacacagatgcattggaagagtactcagaatggttgaaagcacattgggctagcataattactgataacaacggagatatgctgctagatacaaaagtatgtttgatctctatcctttgtattcattgtcttgtaggtgctaatctagtcaaaaaaatttgttctcaagcattgagcattttgatttgttgaatcatcactcatcttaaggaccatttacgtttgtgctgacttgaatcactacatttccttctgccatattttgagagttagtttgattttctctatgaattggttaaccgttagttaacccttacaaatctaaaattccctagttactagtcaactttaacaagtgttttcttaaccaagttaatggattgtggtgtggtgatttaatgagaaatgtttaattttataggtttcatcatctaatctgtttgtgccagagctagaggatgttgttgttgttgcaatccatcagaatatatcacttataagataggtatgcaaccatagatgatacaaatactaaattgttacatcttaataaacattcttcacattcaaattgtgaactatgtctgcagattagagattttgtttcagaacaaacgtttattaggaggtattgaatttcatactgaggagtctcccaagctatcacaaagtcagctgatggctcattctctttaaagaaaccagtcggtgtctcaaggtaaggatggagttatgtttcttaaaagaatacaatttttacttaggcacatattgcatttaattttttaatggtgactaaggacttcgtttgagcagaaatgttgatttcatctttagttcgccacttgttattatgatctcatagtcgttgataatgacaatgcattgtgtatagttaacttggaaatcacttttgttttgagaactccatggtattcaaatcttcctacattaattgtcttctatatatttatatctatatgtaacatgtatattggagtccaattaatgtaaaagatgtaaacaaaagtgaatgtgagtgatatatacttgtagaatatacaaagcatatcattatactaattcttcagcatcttaaatattttcggactttttggtaaaaaaaagagagaaaataaaattaggtattaagattgtatgcataatatagaaatttataaatattatatgttaatatgagatatcttatattattattattattattatttgtaatatttacactaaagactnnnnnnnnnnnnnnnnnnnnnnnnnnnnnnnnnnnnnnnnnnnnnnnnnnnnnnnnnnnnnnnnnnnnnnnnnnnnnnnnnnnnnnnnnnnnnnnnnnnnnnnnnnnnnnnnnnnnnnnnnnnnnnnnnnnnnnnnnnnnnnnnnnnnnnnnnnnnnnnnnnnnnnnnnnnnnnnnnnnnnnnnnnnnnnnnnnnnnnnnnnnnnnnnnnnnnnnnnnnnnnnnnnnnnnnnnnnnnnnnnnnnnnnnnnnnnnnnnnnnnnnnnnnnnnnnnnnnnnnnnnnnnnnnnnnnnnnnnnnnnnnnnnnnnnnnnnnnnnnnnnnnnnnnnnnnnnnnnnnnnnnnnnnnnnnnnnnnnnnnnnnnnnnnnnnnnnnnnnnnnnnnnnnnnnnnnnnnnnnnnnnnnnnnnnnnnnnnnnnnnnnnnnnnnnnnnnnnnnnnnnnnnnnnnnnnnnnnnnnnnnnnnnnnnnnnnnnnnnnnnnnnnnnnnnnnnnnnnnnnnnnnnnnnnnnnnnnnnnnnnnnnnnnnnnnnnnnnnnnnnnnnnnnnnnnnnnnnnnnnnnnnnnnnnnnnnnnnnnnnnnnnnnnnnnnnnnnnnnnnnnnnnnnnnnnnnnnnnnnnnnnnnnnnnnnnnnnnnnnnnnnnnnnnnnnnnnnnnnnnnnnnnnnnnnnnnnnnnnnnnnnnnnnnnnnnnnnnnnnnnnnnnnnnnnnnnnnnnnnnnnnnnnnnnnnnnnnnnnnnnnnnnnnnnnnnnnnnnnnnnnnnnnnnnnnnnnnnnnnnnnnnnnnnnnnnnnnnnnnnnnnnnnnnnnnnnnnnnnnnnnnnnnnnnnnnnnnnnnnnnnnnnnnnnnnnnnnnnnnnnnnnnnnnnnnnnnnnnnnnnnnnnnnnnnnnnnnnnnnnnnnnnnnnnnnnnnnnnnnnnnnnnnnnnnnnnnnnnnnnnnnnnnnnnnnnnnnnnnnnnnnnnnnnnnnnnnnnnnnnnnnnnnnnnnnnnnnnnnnnnnnnnnnnnnnnnnnnnnagtgttgattttcacgatatcgaattcaaagacgattaaaaatcgtcataaaaagtattaaataaccgtttttgaaagacttttttgtattaatgatttatatttcatgtgtagagtatattaacattaatttccccttctttagacataaagattagttacaatgacactgacattttttataagaaccttttcaaacatatgaataaaaagataattttttccttcataataattttatttaactcaaacaaaataacatttttataaaagacaatacacccgtctctcttttataaatgtagggtattcttcacctaagagtcaataatgattacttaatatcttaagttattaaaatttatttaagaaactgatctctgtcatatttaaaatacccgttaagttgtgtcaattgtgtatgattttgtataaagctgaaaatgaattaagaagaatcgagtttgattcagctcattaatatttagtttagcttgaaactcgacttgagttcgacattaacattttttagctcgaactcaactcgatgcaagctcgtaaacatttagctcgaatcacatgaatcaagggtcaattttgtttaaatcctatacattttaatttttcaatttattaatagattttagataaaatgattgtttaatttttttaaaaaatggaaaaactaaacttatcctattaactttgtaggaccggtatgccaaaaaaagttaattacaaccaaagtctgcataaataaaagttatctcaccttacacataaaataatagaaaacacaactaattatatatatcgagtcaattcatgaactaaatgagttgaacttaaacttcgttcatttaatgagctcaatttttaggtcaagtttaacttatttggttcatgaactaaattcaatgaactaattatcaaatataattttaaattatttttgagttggttcagttcattacattcctaattttgtaggttaacaaaatttcaattttaagtaaataatttctttcagttttgtttgttttttattttattttttatcctaagaaattttattcttgtttttctcccgtcctttcaaaatggaaatttcatttatgaagtttattttgcatgatcagtataatttttttacactgattagaaatttttatagatataaattttaaaataattattaaaaaatcaacaatcttatacatgataatttattattaaataacaacataaaaccttttgcactacgatattttcaaattaaatccttcatttatattatttatggattacatattctcaaacaagaaaattgatcattgacatatttattgagacaacaattgcattagtactagctacaatgattatttaattataaccctcgtttgaaaggtactactactagtaatgataattaagatcccccaaaaaaacatcatcaatttctctccaatggaaaaagaataatagtagattatatcataattataagaaaattgattgtaccgaatggccctattcatgctttgtagttcattggggacggagtctacggtacgacaggaaaactcctgcgtatcgtccaaaaggaaatggtagtcgttcgattgggggttttttttatttttctttttttgttgccatttaccaaaacgccatgatcttcctcagcacctccgatcgtacaacaccaaggaccgagtcccttctctcttcttctccgaaccccaccagaacaacagaaccatcgccgccgctgccgccgcatcacagcctcaataacaccatccaccatttaccttttcctttcaccaccctcacaaccgagtcccttctatcttctctccgcgttccgacaccgcaccctcgttctctcttctccaccgagtctatcgaatccacagtggcggtgccaccagtcttcttcaccaacagcttcaagatgcagccgagatcagcacggttcactttgcgatctttcaccttctgatctttcaccttccagaaccttccaaacaatttctcttctgttagcaaaaaaattcacatttttattttttgtcgggatggaattttcttgcttttatattttctctgcttcatgtagttgggggtgtctgtgagatgaacatgtaaagttgagattttttcaattatcttcaatttagcaagtttaattatgttccatcaaaattccccttatcttccagttttcgatctctccaaccctttcacaaagatgcttccttttactggttattcagagaatatttcaatttgaactattcattcacatgcttgtgacaaatatttttgtgtatgtgggtgtgaatcagtgagtctggaatatgctttttcatttttgttttttctgtgaagagttccaatttttttttgtcaatgcttttaatcaatagacgagtcagattccgtcgtggtcgacggttgcagagggcaacgacagtgacggaaatggggctggaacgcagagacgggaatgcgaagagagaagaaagagaaaaaagaaaaaggttagaaagggaaaataagacaaagaaaaagaaaattaaaaaataataactatttgatgaaaattaaaattaatccaacggttaccaatttctctcgcacgatacgcatggattatacttgcgtaccgtatactccgtcttgattgggatgccaacattgccgaaaatcccatccccaggagacaatggcagtacactaatattaatggcccttgaaaaagcacttcaatattaatggcagtacactcatttttgcttaattaaatcgcaagtaaaaatgagaatgctctctcaaaagtgactttcacatgtgcgtactccacccaacattcccaaacaccccccatttgccaccatgtaacaactgtaattaaagctaattcaaataaatacatcagctgtcacgatttattatcagagttcaatgctgatgtaataataccgtaaaacaaagtttgtaattagataacagaataaattagttttatgcaattatgccccttttcattactatgttattatatatagtatatatttattggttattgttgatgattaatttatatgaagaaatctgatcatttttaataaaatttctctctccaattacatttttcaatctacaaaatttgaatcaaaaattttacttttttttattgacaaatgttaatttattaatttttgttaaaatgtctaattgaaagattcaaacacaacatctcttcagtcttctctctcttcttccttcaccattctccaagtagtgagtcaatatcttatatctctttcgaaatcttacctaaggaaaacaaatttagtattacttaaatcaacttagattagtgatttattggtattaatgtattttctcttattattattattattatatggtattatcttttttttttctctccagcctctcgaaccacgtatgatcatactattaatttttgggcaagctttgtgtgattgtacaaaagctttttcaactcgataggttcatgataatgaatgcggatctaattttggagtctgagaatcaaaggaaataaatttgtgttccctgcaagtttcgaccatggaccatcgtggggtctcactagtcaaatgcgaggaagattggtcagtggcagaggcattagagtggtagtttatttctcgacccagcacgttaaggaaaaaatattatgaatcatgggaatgctatgctgctgctagctacagtcattatgaattagatatgctatgttctttctgtctttgggaaccatttggaatccaacaaagtaaagagagaaattaaaatggcataaatgaaagaaataaataatactaatgaaaagggcatggtcaactccacacactgcaccctcttctcccaatcttagttctttccaaatttttaaatatgttccatttgtggataggtatagttggattttaatgtagtttaatttcatcgttccacaagcaatatataacagcaaaacttgctcacttgatatgtaataaaatgtatgtttgatttaattttcaagtaaaaaagtatttttgagagaaaagtaatttttctaaatgatcatatttttatgtgttacattagtattagaacaccaaatttaaagatttcaaatcatgccaacgaaaattgattcaattgataggaatataatgaaaatgcattaatttaataattttggttctgtttatcttattttccataaataaagttgtagtattagttacttgttaaatccttgcatgagttataaaacacaaaacgagcgtgaaagattttttatccattgaaacaaacgtccgtcgaacgttaaactttattctagaaaaatcaaatacacattagttaatcataatattaacttctgtagaagtttgtagcatatctttgcatctttaaataatttattaaaaagaaaaagtttcgaaccaattaaacgatcctatcatgtatacgtaatcccaaatgagcaattccagattagggtgactcactgccactatgagacaacatgagtggcctagtttgattggatggagaaaaataggtaagcaaggaaaattttcaaatttgaattgaaaaaaagagaaatttaaaattttctattaaaaataattttttcttttatttttttcaaacaaaaaaatattttattatttttttttccacccactttatctcctaccaaataaaacataaaagaaatcagacaaagcgtatcactttacgtacagtttcaagcacgtgactaaaaaatggttgtgatttggatatttttttatgatgacaaccttaataaatagttgacaatactgacttttgagcatgatggggctctagaatattcaacacagttacacttgttttattgcgagataaagctcactcgtgacattaggcaagcatgtgggttttaatttaagaacaacttttgtcaatactaagttaggagcagttaataactcaccttgttgagcagaggttaattcaacattagatattaatttttttttatctatctgaatcaaagataagtattagttaatttatacaaattcacacaatttgattaatcaattgaattaatttttttggttaaatagagttaaaagaaccaatctattaggattcatgagaaattattatatgatttaaaactattatttatttatgattatagtcaatttttatattgtataaaatcaaaattttaatttataagaaataattaatataccttaattacttgttaggtatacggtgatctagactaaaattatctaaaaacaattcttatttcatgaatccatttccccccaaaaactgttgacaatcaactggagaatcgcgctgtgtcatacaatctatattattcatcgagaatctgcataaaaaaggaaattcgacaatgaagaaaataaataaaagatatgaaaaacatttgtcttgtatcaaatgcaatggaggaagttcgacattccatttccacgcattaaaaaaggaacagtaatttctttaataatttgcataactatgataaagaaatgacacgtgcatgaaagcgagcttcaaattgtgatatttagaatcagatacaccacaaagataaaaagctatatgctcgtgaaaaaaagtgtcaattagagttgtcattgttgacaaaaaaaaattctattaaaaattgatcgaagtattagtattatgaatttaaattaataataagttgtgtcaaattaagtattcatcccaagaactaacacggacctataattaatatatatatatattgataattgtatatattttggttaataaaaataaatatttatcttatacaataaacacaaattaaaataagatgattaactaagcttttaattcttaatttttttaaattcaatatttagttcctaaataaaagtttgattatttaaggtctcaatttttttttattaggagtctttggatacaatattttttttttcatgtcaagaatcatcatttctaaaaattatcaacttgagaatcatgatttctaactatacagtaatttnnnnnnnnnnnnnnnnnnnnnnnnnnnnnnnnnnnnnnnnnnnnnnnnnnnnnnnnnnnnnnnnnnnnnnnnnnnnnnnnnnnnnnnnnnnnnnnnnnnnnnnnnnnnnnnnnnnnnnnnnnnnnnnnnnnnnnnnnnnnnnnnnnnnnnnnnnnnnnnnnnnnnnnnnnnnnnnnnnnnnnnnnnnnnnnnnnnnnnnnnnnnnnnnnnnnnnnnnnnnnnnnnnnnnnnnnnnnnnnnnnnnnnnnnnnnnnnnnnnnnnnnnnnnnnnnnnnnnnnnnnnnnnnnnnnnnnnnnnnnnnnnnnnnnnnnnnnnnnnnnnnnnnnnnnnnnnnnnnnnnnnnnnnnnnnnnnnnnnnnnnnnnnnnnnnnnnnnnnnnnnnnnnnnnnnnnnnnnnnnnnnnnnnnnnnnnnnnnnnnnnnnnnnnnnnnnnnnttttattacaaattttattatttaatacattaaataatgagttaataagaataaaaaaatatttttattgtagtaaacttgtttttaaattcgaaaaagttagattttcactttttttcatgaaaatatttcctggaaatgttaatttaaaaaaataaaaaatgaaaaataaacattttcatgaaactaaaaaaaattcttgtaccaaggcgtccccttaatgctttttgtcattgaacaaaattttgacctgttaaattctcaaaacttttttaaaactttttgttgaataattaaaaattgatttttaaacagtttaaagacattgattggttaaattttaaaaataaaaaaacattaatccgtcaaacttttatttaaaactaaaaaatcaaattttgaaaagttaaaaaactaaaaacttaatcagcctgttaaaatactagtattcataaaatgtgacacatacaaaagatattttcacacttttcacagttagatcaatcaacaatacatctcccccggcctacccatatttcaatcttcaagagattactctcttttattttatacccattctttctttctttaattttttttctttttcttcctataatgcaaactcaattgtgttattattgttttagacggtgactcacgagtgtatccactttagataagatcatcaggtgtttgaaatctcccacaaacccgcaagcgtctcaatcaaagtattgtgctatgtttttattgttattattttctttttaatatattaagtttgttaactagtcttgtctaaacatcttgttctcatgattaagcattgtgtttttttccaagtgcatgaatgtttaattaccattcatgcccacgtgtgtgatgaaaatatcctgattgaatattgggttcgtttcatgagagtttttttttcctaatcattgattgatatagaaatcaccttctgtaaattaaatcagagaagactttaatatttacttatttcatgagattttattctaattgattgccactctcagatgattattcatgattttgggtggcacactggaagctcaatgccatgaaagcgtggtagatctggtttgaggccatatggaaagtggtttgttggcatgtgatagattgtgctcattgcgaaggaaagatcaagttctgacatttctgttttttttaatgaagggaattacctaagttggccaatcttaaggaactattaagttagttagcagttcaaaattaatactataacataagtattccactcttcctttgttgcttacatatagcaattcaaaatccctaatgtggagcttttttaatcgttaagtaagtccgtagtgataaaatatagaattttgcttgatacgacaatctatagtgttggtttgcttgataaaatatagaacttttttaatcgttaagtccctaacataagtacgtatttttttcttagctttttcgccccacttggtctatatctttcggtggttacttcatatttatcattctatgttggtaaatatttattaaccacatattacatgttggtatggggctgattatgtaagttttatgggtacatcttgtatccctttgcctataaaagaaaactgacaatctatagtatgagaatataaatattattcttttaaaggatgagaatacaaattaaataatactctcctaaaaaaatatttatgtttaaataatgccagagacaatgtggaaagaaaaaagtagtggagttcaataattaatttagtgcattgaatttgaagcatgcttgtcaagcattgcatcatacaattaatatagtatatactattactatatgatacaaatattgcccctaaaattatggtgcacttatcaccgtcatctgtatgtggggacacaaatctctaataattactcagctataggaatgatctttttgggcctcccaaattcatccattaacataaacagttttaatttccacatcaatttcatatatatatatatatatatatatatatattatccaattaccctccctcgcttttgtggtttaactaataggtaaattgttcagacaagtaaatatttaggtacaggatttacaatactattaattatacaatattgcaagcaatataatgtccttgttgataacgatatatcgatcatcttggagattttaacgattccacatgagattttccgcatggtcctctcaatctaatgaagagcctgtattcatcaaaggtcatgggcgtgtagagtgcaggtttgtctggctttaccaattcctttgctggctcaatgggtatgtcacttttgggattgtagaagaaggctagggaaactctctctttgtctgaatttactagcaccctgtgctccacactcttgtagtttgcattgcttagaaccttgtcaaacaaaaactaaaataaattagtatgattttcacattgataagctacatactaaagatctaaccttgaatttcaactggaagtaacatggtcgtgcaaacttaaaatcggagacaaagatctaccttatatgttgtaccgcgacgttgcttaagcaaattaaagcaaatatatcccctaatctataattattataatgataattatcttatttagtatacatatttattatttccaatttatcctcaattatattttttcattactatctatctagagagaaaaaagtaaaaaataatattatcattctcaaaacacgtaacatacttaattgtctcactattatacaaatctcaattgttttgtaaacagctagacacaaagtgcctcatttttgcccttagtcttagcttatataatgatcttagcaatatcagtgtcacgataacgtcatgctctcattaggtgtttatttgcatgtttattttattttgacttagttcatacatcataaaactttaatcaatgtcatgtctattttgaattttttttattaaatataaataagcatagattataggtatcttaacagtactcttttagttgaagtctcaattattggagcggctataaccttttttagtagtcaacataatctagatatatttcatcttatacagatagaaataatattttactaggtgcaatgtttggtcttttgaacatcatcaaaagatgcaattatgtactagctagttataattggtagataagttatcattgctttatatgatgagggtatgattggtcatgacgaccactatgaaggatagagtttcagtcacaaacttaggaaggtaaaagcacaaatgagcttaggcaatgaaatcatttgttcagaaatgtcatgccaataaagaacgaccttatccctaatgccgtggccaacaggccaaatgtttatccatttttatttgtgcgagctgattctgtgacagtgaaaagaacattctttataattaagatctctttcaagttcaaatcaaactgtcactaataaaaattattttactactaatttataataaaacatttatcaatagtttctattattaacagttatattaacaaataattttattagtatatcaaattaactaatacacatgtcatcaatacatcatattactagctagtacaatatacatattttactctattaatgtatttcaaaataattatactaataatttaatttccattagaaaaatctacagtcacgaaaactaaccgaacaataaaccacacgtaatccttggcttgactatgatgtcagatgtgaaaactaaaactatataattaagaatacattgttccttcccaaataaataaaataaaagttaattaattataggtttatattcgctatataatttttttacactatcaactaattagagatgactattaatatgagttttaaaatattaaatacaaaattatacaactaaatattaatttataactattttacagtatgttcgtaatatatttttctaatgtgatacatgcatccgtcaaaaaatccgaggaattaaggacaaactaaaaaagaatcaaccctcaacttgaaatgtccgctccatgtgacagatgcatgtatcatgaatttgtagccaaagattccatgaggatatttaagagagagagagtattcacctgaatttggtctccaatattgagaataaaagcatggcgaaggggcttcaccgtaatccaattgttgccttttcggacttgaagaccagggacttggtcgtcagaaagtaaaagtgtcatgcctcctggatctgagtgcgaagacaaacccagcgtcaactctggccttggacactttgagtaaaaattcaccctcatgcatgctccaacatcttctcctccaaaagctttctgaagaacatcctcttccaatccaaggtttatggatagaaccttcatcaacctcccacatagcttcaccagctctctcccatactcatcacacacttccctgcattaattcaagtttttatataaatatatgtggttgttatcttagctagggatataatatagttaataactttaaaattttaaatagttaatttatgatatatatggtattcgagtctcttgtattcaattgtaatctagaattcaatcttcgtcaatctcattcttccaatagaaaagcaagtgaatttatgcattattcatgcatgctttgtgtccaaaggagtcttgggtgatagaacatgctagacatataatataattaatcattgatgtatatatcattatggtttaaacagtttgggtaattcgatatcataaggattatataccaaaaggcaagacatacaaataagaactcgaccacatatagtaaagatatataaataaagagtttaatttttatttatttacgattttaattatactgttaattaagagaaatcatgacacaaatcacttctaaatttaaaatatattttttttaagaaatagaagtcaaataaacttattataagaatatatggtaatgaactagaatgtaaaaactgataaacttaattaatcagtttatagacaattttctagtaagaattaaattcattacaagtttattaaattagatatgtacctgcaagagggaggctgaatgggccatttgttattgtccttcaaagacaagggaaggtaatgaagataatagtaatcactccagtcaagaatggcacctttctgaatcccaagcctgctaccataaccttcataggtttttggcgagtttgcatactgctgcttcacctccaaaggcatgtgaaagaactggcgccaagtttccctagccatgtccatcagctgagggttaacaccatggtttacgatttggaagaagccccactcattacaagcctcagagattttcttcagtgtggaggttcgagcatctgggtcgctaccataaagccctgcaaggtcaatgattgggatgttggcatcatcaacagcaacggcatcagatggacggtcactgaggggtttgatatacctctcagggattgaatctgtgcacctttcggacaaggactgaaccctgactattggctcaggccaatcttgtgggctattgttttttatcattttaatttttaactacacagtttttgttttaggcttgttctccaaggtactcttcatagttcatatcatggatatatatatatatatatatatatatatgtgtgtgtgtgtgtgtacagctaaagtactatgaaacaaaacaaagggtgttgattttactggaacagttggggtccgtggagaagagggcgagtcctttcgaagtgttaaagttgtatctttataatttgttgtgtctttataatttgatgatcatgtagaaacaatttctttacatacttaactataaagctgaatacaatatcattcctcagaaacctatgaataatgagtaggagtggagccagaaatttttttgacagccaacataaaaaaattatatcataaataaaagtattctgaagacaatataaatctaatatacaaaaagatacaaatcgcaaatcacatacagacaaattgcaaacaaggtgggttgatgaacaagttgacaaagtttaatgagtcttaataaaataattcataatttaaaatcaaactcaaagtaataatatgaagataagagataaagaagacacaatcagttttagcgtggaaaattcaattggataaaaaatcacaacgtccaaattggataatcaatccaatggacaactcactatgatgataaataagtacatttaaattctgatgaagagttaaaaattagacttgtcaaacgcttttatatgatctcataacaattctctcaactatgaaaatataaactctttaaagttcttatattatttggaatgaaatgcatactatcaacacaaaaacatgtttctatttatactaatttaagcatatgattttaaccaatttttgaatataattctaaaaatattttatcataatacaatcttaaagatattttatattatacaataaaatcttaaaaatattatgtcctattttttaatataatattaaaaaatattttatcctattttttaatataatattaaaaaatattatattttattatattatacaatataatattttttattatcaaattatttttttaatttttaattttaaatatatatatatatatatatatatatataataaaatttatattaataaaattttagaggagacccaagctaccccctccctcctcctctgataatgagatagggtatgtgggtgttagatataaaaagggagaggtgggcgcaatggggcatggggggaaatggacttgaatatgaaacgtggaattcgtgggggtttaataggtgtgaatgcttcataagttaatgcaaaagaaaaaattagatgagacaatttagtgggtatttttttgcaaaggtggggttggcagcaggtctccttgaagttgacgtaaaagaaataaaaacagcatatatcaaatgtgaatttattggctccagttcattttattatttcgaaaatgtttgctgtacatcaggcttttataccttatttttaaaagaaaataaaaagataaatgtttgagttagaataataattgtctttgcctttcagattcagtagttgaggatctataaatcatccgatcaagaataataattgtctgtgccttttaaatttggcgctggaaaagactgtgaatcgtgctaccctaataagaatcaaattatacatgtggattaaaatataaattatacggtaactaacactcattcaattacaatttattatatatgataaaataattattttaaaataatgtaaacagtgatttannnnnnnnnnnnnnnnnnnnnnnnnnnnnnnnnnnnnnnnnnnnnnnnnnnnnnnnnnnnnnnnnnnnnnnnnnnnnnnnnnnnnnnnnnnnnnnnnnnnnnnnnnnnnnnnnnnnnnnnnnnnnnnnnnnnnnnnnnnnnnnnnnnnnnnnnnnnnnnnnnnnnnnnnnnnnnnnnnnnnnnnnnnnnnnnnnnnnnnnnnnnnnnnnnnnnnnnnnnnnnnnnnnnnnnnnnnnnnnnnnnnnnnnnnnnnnnnnnnnnnnnnnnnnnnnnnnnnnnnnnnnnnnnnnnnnnnnnnnnnnnnnnnnnnnnnnnnnnnnnnnnnnnnnnnnnnnnnnnnnnnnnnnnnnnnnnnnnnnnnnnnnnnnnnnnnnnnnnnnnnnnnnnnnnnnnnnnnnnnnnnnnnnnnnnnnnnnnnnnnnnnnnnnnnnnnnnnnnnnnnnnnnnnnnnnnnnnnnnnnnnnnnnnnnnnnnnnnnnnnnnnnnnnnnnnnnnnnnnnnnnnnnnnnnnnnnnnnnnnnnnnnnnnnnnnnnnnnnnnnnnnnnnnnnnnnnnnnnnnnnnnnnnnnnnnnnnnnnnnnnnnnnnnnnnnnnnnnnnnnnnnnnnnnnnnnnnnnnnnnnnnnnnnnnnnnnnnnnnnnnttatctctttttttattacactatatcatcaatcaaattaattatttatattttctttttctttttctctcaagttatagaaaaatcaagattgttcaggaaacattttttaaacaaaaagtaagaggacaaattaacgaaattgtgaattaaaacaaaaattgtactataaagtaacatgtcatgtatattgcttacgttacatatgactgccaaacaaattattgatgtgaacaaatggattatcgatcactaaataaatattataagaagcataatatatatcatgtttttggaatcttttctataagaagccacagaaaaatattatataactaaaaagatatttatgtgtttcttaaaaatatgtgagatgtagcaaagaatgatataagacacgggttaaattaatttataagttactcaaaagtcttaactgacatttttaattaattgcagaagtttgataataatattttcttgatacgtagtttgataataatattgatctatagtaacgtacagtttatattattatctaaaaaacaatttatattattattgcaatatacattctacaatattaattaaaaactagctagcaataggatgaatatggccacacccctcatcttacaactcatgtcgacagatatggattgaaagggatagccctattccggcgccgagcacaacttgatcattttatgctttgctattttaatacatatgtctaattctgaaccagaaaaattctgagttcaataatcttaattataagccaccaagatttgtagccttgctttcactgtatggaaatgtttgaggctgggatttaagttgtcccgaagtgtttgttgggacttttattgaattggttcatatgtttcttctttttccccttctaaagagcatcaactgtttgcgtatattaggtactccctatatgtctctttgttttcaattccgatccagtgtttagtggtaacatgaaattaatggttttgtttattaaaatcttaactgtaattttaattctttaaatattattaatgtatgattttagtttctctataattttttaagtaaatttaataaccattttttattattaaaattatgacctttcacgacttttttgttatttaaaattctcatttttttattttattactcaaaatgataataaattgaattgattaaattattttaaatcttagattaattgcatatacatataatctaaaacaaagaaaccaacaaaactataattaagtcttaaatcttctttcgttcaaaacatactaccaaaatatcatattttttctcaaaataaaaaatatccaattttcctctttttcaaaccttaatctcaattccttcaaaattgttcaaattttaagaaactttcactaaatttatgacttataaacattcaaaaggattttatattccaaattcatcataaattttctagtatttaaatagaaaaaaataagattttaagaatgttagatctacaaaaattgacaagatgactatatttgttcaatataaaaaataaagagattttatttgctaaaaaaaaataggaaagaaaaattactcataatatttaagttaaagaaactaaaatgaaattaagttaatcctaaatatctcttacatgaaatttcattattttcatatattaattacttcactttatgtcttttaaatatgtatttgtacatcattatcactcttatccctttattaatttataaattatgaaaataagttaggtataataaaaatgaatagattagtccgtgcaaattaaaaatagttaagaaatattaaagagactaaatgaacccttaaacagtgcaatatttggtataaatacaaacagaattggccttaagggtccgtttgatcggagagaaaatagaagaaaagaaatcagaaggaaagaaaacacgattaacgaaacattttcctctgtttgtttgaagaaaaaatagaaaaaaaagttattttttagttacaaaaatttaaatttttccttcttttcattttccttccaattcaaattttaaaattttccttctattttccttcattccatttttttctttcctaaccaagcatagggtaagatttggttggaagaatttatttacaatttgtgtgtgtgtgtttatcttatggcataagtacatgataaagaatgtggcgattttcgcatgataaggaggcaggatgatttaacatttcagactctagtgatggttctttgtcttattaggccaataggcccaatgcctatctattgcaggctgagttcttttgttatggagggacattgcaaagtggaaggtgctggaagactgcctcctaattggtttctgaagacaaggattctgattttttgttgtggaaggcttccctttataagattgtatttttcaataaatttcagctaacaataattagtttaaagaaattattagagagtatgttagtagtatccttttacttttattaaataaagggatgagagtgataaagatgtacaaataattaaaaaaaaacaactcaaaatttaccacgttatttccttggatttgaattccctaccattttaaattatgaattaatctttatcttgctggagaaaaattaaaatggagagtaatcattctaggaacttgtgatgtgaattaaaatgcttatgttctttcacgaatgttagcttattggatcttgacagagttctgttattcttgagctacttattctttacaacctaaattttgcatcggaatggtagtttattagttcttgacacgtagttgagacaatttttggcaacattagaagaatcaatgccttgtgtcgcgtactagaaagggttcgcttgtaattgaaatgactctaaacacttataaggtgtggtaaaacacaagctcattaagagaaggtaatctaattgcacttagtaatttatgtatgccattattatagaaagatacaactttgaaatgaagggaatgtcgggaaacattgttatccagattagagggttatgtggcggaatggcggcccaatggttcctataggtagttgactcctgggataaactttatacaccagcagaaagactaatataccagtccgcacagtgtagttacgaaaataccttcactttattgcaggctttatacatacggattcgcaaatccgtaagattcttacggattcgcgaatccgtaatattttttttgagttatacggattggacaatccgtatggaccatacggattacccaatccgtataaagtaattttttttttaaaagttaaaatatatttttcaaaataatggcacatgcaggtctcgaacctatgaccttcatgttattaacacaatactctaaccaactgagctaatacatcaattatattaaaaaataactaatgttgatacatataatactaaattttttaatgtatatttaatacacatatgattttatataataaattttgatctaataattaaagtatttttttacatataaaaatcatagttttaaattaaaatcataagtttaataaaaatttgcaggtctaataaaaattatatttgtatttacatgttaaattaaaaatcatatatgtatttacaatttattaaacttatgattttaatttaaatttataatttttatatgtaaaaaatactttaattattagatcaaaattaattgttacaaaatttattatataaaattatatgtgtattaaatatacattaaaaaatttagtattatatgtatcaacattagttattttttaacataattgatatattagctcagttggttggagcattgcgttaataacgtgaaagtcataggttcgagacctgcatgtatcattattttgaaaaatatattttaactttaaaaaaaaaaaactcacttacggattgggtaatccatatgggctatacggattgggtcgtataactcaaaaaaaacattacgaatttgcgaatccgtaagaatcttacggatttacgaatccgtatgtataaagcctgcaataaagtgaggggattttcggaatcgcactgtgcggactggtgtattagtctttctgctggtgtataaagtttatcccttgactccttcgttgaatgagttggtcttggtttatagagtttgttttgggagtttagcaacccacgtgcttaaatttgtcaaggataatgtttaaggcacgttagtaaaataggcaaaccaaaaaaaaaaaaatgcatgaagtacattttgtatcttcgatatgaaataaacgctgacatgatcggcataaagtacacgttatgtgtaatcgttaaattttatgcaaaatcgtgctgtaagatattaatataatatgtatttttttagaaattaaagataatgttagaatttataataatttatacacttttattcaactaattgagctagatttcattgatatatatatatatatataataaatcaagagataaataattgaatatgctcttattgtcgcattttgtgagttatcttctggacttatttcaggaagtataccgccaaatgaacgaaaactgtgtaaataaaaatatataatttatgccgcgcaactaaatttaaatttctataaacaaatataaagttaacctccataaactagagataaacttactaatcgactagaatatgttatgatgaatttctgtgttgtttctctagcacaactttttaatacaaaaccatgacatattagatctgtccagttaagttcataaaaaattgcatcttcatgattctctcaaatgaaacatggacatattttttttaatctaattccatcattaaataattgttaacatttagtttcgaggaaaaaaatattgatatttttcacattttattcgtgatttaaaaagtatcaatttacctgaaaatgcattatgcagcatgaaacttattgaggtttattatattattataatatacaaaattatgtgatgtacacgataattaaattaaactaatatgtgcatcagaaaaataaaataataataacacgcaccacgttggaccaaatatgtttacaaacagtcagtaagtgatggaatcagctacctttgcaaactgcgaggccagttctccattccagaacttcaacttcgaaaggaaatgcataagcgtatggatgaaaataagaaatgcaaccaatcataactgccaccatttacgattttccattcttttagcgagctcagttgccatggatgcaaagtcttgtgccccattttgcaactcctcagtacgttcgttgagtatctagtaaaagaatggcaagacatggttagatagaaaaataaaacacgtatttgggagaattccagctaagtttcaattcatcgtaactaaaaaatactttgatttctcatacagctaggtgtgtaggtgtgtgggtgtgtgtaagaaatgtctgtttttagaaacttgataaaaatggaatttctttttggtgattcaggttttatgttctttgaaaaggagaagtttgaaattgtcaaaaataagatacgggtaatggattaaggaatcaaacaatcatctacctggagtttttcttgccgctctacaagtttatcccttgcaagtgcagctgctgccgaggcatcctgacaccagtgaaaagtcaagacatgatctaaaatgagtaaattacagaattttcagatctagatttacccccgtctttctgtatttagccttaatttcctcagctgttctagcttttggttttgagtctgtgctcgcttcttcaagtaatttctgtctgtctgttcctttccctttatctgcaaggcaaccattcaatactcaaaagataaaaccataaaatacattttggagaaaataaaacaatatagatgtacctctcttgtcaatatcgattttctgaggagatgaaaaaactacaggttcatcaatttgaatgtcatctgcaaaagataaggtaacattttaagaaaataaagaatagttggcagtagaaaatgttagggacaaacctatgtcaatcgcaaaaggatcttgcttatctactgtgctcgaggaagactttaagaaaggaggactggagaataattgttttaaattttccaatctattagtatgaactgcttgatttgcattctgatccgcattccccgctttaaagttcttagctatattaagaaagatgacagatgctccctatagcaagataagttgaattacaagtcctgaaaaataatgggagaaaaagcactgcaagcctgaacaaactagacctgtctttcattttgctttggagatagacttgctgtagcatcaactgcagctgcaagaacttcatcatgaagacaaggaaaagactctggagtcctacaagaatttgaaagcatgttggaaaccaaatttctaagtattaacgagacaagatataattttctaaaacatttttttgtagagaggctgatcacattcagcaaccacctgtgggttgtcccaggctctcttcaaatttgatttcatttaatttgtcataagaagctttgctatgttgaaacattttattcaatactttgaatatgaacattagtgcgctaaattgtggggttgagagttgatgattaattgctcaataaaacatatatggccagaaaagggaggaatgatgttaccagaactcattttcacagttcaacagtgatatgcaagcagtttcattcccgttgacctataaaacaagatggccatgagtttgattatgcatgcaacattgttttcttgcactttctgtgcataatccttttgaagaatcgaaaacacataaaaggtaaatgtatggtggttttaattattttttcctcaaagcagaactattgatgttaattgtggattatcatgaaccgactctcccaaaatcttaagctgctagatgaaaactcacaaatggttgtatatctaacacaccctctcactagccattacttgcagcatggatatgcactagcccacctatttggtgctggaattcaattttttccaataccttatgatcaagttacactatcctctcctcccctctattcttaaaaattacactcccctcacttcagataaaaatatactgcacttcattttgatgtgaacaaacctcttagtgttggtgaataactacaaatgagcttttcaatggcatttttcctctctaaatttcaatctcactgaattaattttaaacatcaattgatttttataactatattatcaattttaggaatttagaagatgaaatgaaattttaaacacccctacgattagttttggaacttcatccagaatctcaatttcatcttttagagtcccaaagtcaataataaggattcaaaagtagttgaagatgttgagagtcacagaaaaaaatcatccataagaagctcattcacataaaaatagattaaagtgtgccatatattaatttatcaatgtgtaatttttcaaaataaagggaaggtagtgttatatatacatctcctagacctagaggcaggggcataattttttttaaaattattcagaattagaacaatgagggcagcaaggatcaaacttctaactagttggttatagaggatttgacactataactatatatgagtgaattttccctatagttcaagctgttaggtgaaagttcatatacagttttatatctaacatgaattattcaatgtaattagatatactatatttcaggagttgttctagtaactggtacaaggcatgtaaagtagttattttagatcattgttaaactggaacattggagactcttgtgataaaatcagacaaaggaggaaacagaataacaacaacaaaaaccttatcacactaggtgaaaaggaggaaagaaaataaactggaaaattttgttaagcgtttccaaatgagagttcagtttactatatctcctgcatgatcaactgtttgaaaatatttaactgaatagatattggttaattggtattctagaattagtaaaaaagttgtgttttaattccttgatcgaatatgaattacaaggcagaaataaataatgaaaactgtacactaatataggaaactaaaacggaaaggaatgaagtcattccctaatctaacaatttaaaaacaaaagggattttatatacaaataatccctttaaggaaggtaaataaaaaagattacatctggtccaaatccaactaatagaacctaggaaaacagaatctgccaaatgccaattacagtatattctaattttctaaaacagtatccaacagatatatattgaactcaaaatattaaacattttgtaaagtgacatatcaagcttaagacaacagacaaatcatgtaaattttggcagcatgtaagaaaatagcttcatttgaaaaacaagaaaaatttcaaaccagaataatttttccatttgatgaagaacatatcgtcttctccatgttggtttccaagttccatctgaggattgacattaaagaggtatctcccaacacttccaaatctggcaaggacctgctcaaagtgagataacatccatcaaaacttataaaaaaaggagagtggggaatatagcaagtggaccatcacatctcaaaaagctagtatgatacagcaacacgacaacattctctagaataactactagaaattcaaagccaaaagtgcatgatttctattcccaaaaaataatccaaatcacctagatcctttagggtaaaaacagcattcagtttggagacaagggactgaatgagactggaattgcttctagttatgatgatgtcatccacatagactaggatgtaaacaacagaattttgctcagaatagaaaaaaagagaaggatcatacttgctggaggaaaatttaaattataggaactctcctcttgaaggactcaaagcctggatacacaagctctgggagcttgttttaagccataaatagctttttgcagctgatacacaagctgtttgttggaggatttaaagcctggaggctgagtcatatagacttcctcttgaagggttccattgagaaaagaattattcacatccagctcttgtagaggccacttataggtgagagaaagtgagagaattatcttgacagtgacaggtttaatgacgggaaaaagtttcattgtaatcatatcatagctgctggtggaagccattggcaacaagcctggctttgtatttatttactgtcccatcaggattttccttaatcctgaaaacccacttgcagccaatgtctttccttgaaggtggaaagtcaactaaggtccaagtgccatttctgagtaatgcatcatactcagccttcatagcagcaagccaagttggatttgaaagagcagatttggtagttttgggttcaaggtgggtgagaagtaatgttggattgattcttggtttaacaataccagatttagcacgagtacacactgagtgttcatagtcaggtttaacaagagaaggctgtaaaggaggttcagaatgaagagggggttctgaagttgcattgagtggtgtgggtgcactgagtggtgtgagtggttcaggttcagtagctggtattgattagttaggctcaatagtttgaaagaatggttcaggttcatttacttgtaagaatggtgaggtaagttgatttgatggtgatagaactatgtgtagtaacagtggtgggagtaggcaaaggctgttgtgaaggtgtgaggagagtaagggttgaggtaatgttaggtggttctgacgtaattaaagaggggctaggaaaaagagttttgtaaggaaaacaagactcataaaagtaacatctttggagatgtatatcctaccatcagctgcaaggcatttatagcctttgtgggaagtagagtagcccaaaaagatgcattcctgtgacctataatttaacttgtgcttgttgtaaggtctaagcagaggaaggcaagagcagtcaaacaccttaagaaaggtataatcatgtaatttctaaaacagcctttgatatgaaacctcattgtttatggaagaagagggaagccggttgataagatagacacttgaagtgaaggcatgatcccaataatgaagaggcatgttagcttgagagacgaaggttagaccaccaagttccactatatgtcgatgcttcctttccacaaccccattttggtgatgggtgtgggggcatattaatccgtgcaaaattcccaggtcattgagaaacttggtgaagggtctgaacccccaccccaatctgattggacagctttaattggaagattaaaccgagtttgaatcatagctttgaactgtttaaaaacctccaaagtttctgatttagttttaagtaagtatacccaagtaaacctaatatgagcatcaacaaaagtaatgtaatacttaaaacctgagggagaaggaatatgagcaggaccccacaaatcagtaaatataagtgcaaaaggttttgaatagactgatttagaggaagatgagggacgtctacgagacttaccaacacaacaatgattacaaaaatcagaaacatttttattgattggtggactattacaaagtttaaagacaattttcatagcatccacactaggatgacctagtctagaatgccaagtagaaaaggaacttgaagtataagcagctgtatttacaataggaacaacagatttacaagaatctgtatctacaataggaacgacagaatcacttctatcaacagaaacagaagcatttttacttacaaaaacagtattttaacagaagcaaaatcagcagtgctaagagactgagaagtccgaggcaccaaagactttaaggcgggaaattggtagagaccatcacgtcccactatcccttgaaaaagagtttcttcagtgtcttgtgatttaacaatacaaaaagaagaatgaaattcaaagaaagcatcattatctttacaaaattgactcacactaattggatttttagtaattgagggaataacagcaagattacttaggacaagagacaaattaggttttaaaggagagggaaatgtagagacacctgaggaattgacgttaagtccttgaccattaccaatagtaatctggtcaggaccctcaaaaagagttagctgctggatgttttgggacatattggtgacacggtaagatgcaccagaatcaggataccagctctgtgaaggagactgagcagtgctggtaagataagcctgagaagcagcatgagatgtggaactcgaaggcacacttgaaggcacaggattgggtgtatagggtaactgagtggatacagttaagggtaggcaaactgtggtggcaacatgtattgaggttggtgaaagtaagaaggagtccaaaacggggggcaccactaagctggtgcttgagtagtggtagatgcaacaggagaagccacagtcgaaaccgcagaggaagcagcagaagtagcagaagccgtggtactagaagcaataggaatagtagcaacatagttctcatcataccaatgataacagaaagatgcgtcatgcccccatttgtgacacacctggcattggacatcagcaaaatgatctcgaccaccaccgccgcgtccaaagctccgtttaatcaatacatgctcagtttatatagagcttaacaaacataacagaactaactgagtaactagctaactacagttgtactaacagaaaaataaacccatcagagtaggtatactctaatattttatgaatcaaaactgggacttttaatgttgggatgtggggtaatccaagtcccagtaaaaaataatataaaattaatgaacctccattataaactatttatttgaaggatactaagttaatttataaaggccattacaaaattcaatttttattcattaacaaaattcaaaatttccttttctttttgactggtggggttgtgttggctattttcatttaatgtggctccactcatgaactgaatagcattactgtgaccaaattacaagaaagcatattcatataagtataaccttaattcaatgtctccactttgatacagaagaaccaaaacacactctttctcgtctttcttgaaggttgtagtccagcagcatcgttgtacaaggttcacctttcgtatgtacttactgctaccctattattaggaaatttcattaccagtaggaaggaatggattgaaatttgaaggaagatggatgtgaagagcagcacctcaatcacaaaatttaaagagtgtaagctcaattcactctcgtaacaaagtaaaatgagtgagttcgatatcatctgcccaaaatatgaattctctatggtagtagcactttcaacttcaacttgtgcattttcagattggatgttagcttgcattctcgaatcactcttcagaggcgagttgggtgtcagtttttcagcagataggtcagacgtattaccatctgaaataacacagcaacataagtaataaaattgataacagattataatatttaattttctcatcgaaaatacttgccaataatgtgcattgaaattgcatttgattttacgctggggctcattgtcctactgcaaaccatattccctgtcatggtatctattgcaacaaagtgtgcatcccttgtcatcacatagactagccccactccaggagtgtcagaaatatcagatacagattccagtggtttgtttaacctactatctgaaaattttgcattcatagaaacaactaccgaagaagtgatagattcagtttttgtaacaaacaaaactgatgatgaactgatatcaagcatagccacctgtaaaatgaattagaaaaatataagctgcaaacttagtgctagtttaattcaaattgccactcaacaactcaaccaagtgaccaaaaacaaataaaccatttccttcaaaaaggaaaagaattaatgggtgatctcacctgcccatgttcatatccaacaacaagcttccctccaaagtttgcaaactgtaggctgcatacagcagaattttgaagggaaaacacagctttgcaatgaggtccatccccttgatgcgtattatgaactgtctcattagataaaaacaggttaaaatcctagattagaaaataaaaatatcaaatcattttttagcataaacagatacatgagaagtaacttaggtcattgacaattaaactgtttaacttccccttggcaattggggagcagataagcaaagtacccttttttattgataaggcttacaccatgagtatggcatttcaaatagaaaacaaaaaatacccaaccttcagttccattttctgtcactaagtgcaaagtggtgtcatctgaactccttattagcccatatagacgaacctacacattcccataggatacagttaccaggcattcaagactattgaataagaagagaatgataaatgctaaatactattaaatcttacaacaccactttcatcgccaacagcaagatgtagagtatcagggcaaaaacctaatgctgacactggcacacttgcattgccaattttaacatcattaacctgccaatagcaaaattattttttctttcatgatttaccaccagcatatgtctccaataaatgagtttcaataaatatacaaatgcaacaggggtgggggtgggtaaaaaatatcttttttaaagattgtatactctataatgaattatctaacctcatattctatgttgtaaagaattgacaaagcaggatatgtagcatcccatatccgaacagatccatcttggtaacctgctatgtatatttgaataataggatggtcttctttgaatggctgacctggaacaccaccagtcaaaggccactttataccaatacttttctgattttgtattgaacgatgctttgcagccacaagaatctacacattgtttgctattagtgttgagttgtgacaatcaaattttttatcgttataaataattaaaaatgttggtgctgcaaacttaacattatataacatttaacaccagggttaacagctagacatggaaaaagaaatttagacctaatacatgtgcagtaccttgaacagggccttaaatgacttcacatcttgacataccacatcaaggcttgctattgtcatgtgtggttcaagagtggggatgaggatgggatactgcacagtgggaacagaagccttcttttcttgctgagacattgtagaagacaaacaatcattgtcataaagatccagttgtccaggacttgtcaatacaaatagcatattacaagccccttctgtatggcaatcagtagataacaaagccacatcagcaaaagaaccatgaagtgtaacatctatgcagtcagtgcacttaagattttcaatcccaaaggaccaatcaatgctcagaacctgtaaacatgaaaggggcacatcatagtgacacattaattatctacataaataaattttcaaatctaatgtagcaaaagtgaaatactaattgtagcaacaatcagtttcaacaaaatagtaattattaaatgaccctctccccgtaccttgatttccttggcatagcaaggaacctctaggcacttggatacataattttttttaacaaaggaattaaaaacagaaacattctcgaagtgagcatagatcattgacaatgtttcttctaacctattcaacctttgggataaaatcataaaactcttgcttctcctaccaagaggccacctcacacaatctccacccttaaccctttaaacacaagagttttgcctccagctcacttcttctttcaactaaacattcacaagactacctgttaaggtaaggatcttgtgacaacttgaacttgtggcactcattattatggcttttttttctgttattatattcaaacactacaatcataaccaaaacaaaggaaattttttcttatctaagcataatctcttgcaaatataaacattatgatagatgacatgatgttttcaattattacaataactattaaaacgccaatgtcaaatagctagtatgcgtatgaagcttactgttagaacttcttcagatccaatctcatgaccaccatagacaaaaagtttccccccactactattggcacaccaatgtaaaacaataatagggagtcttctatcagctgatgataattgaagcttgacaacattattcgacaatcttttaacttgttggtcaaggggaaagtcggcagttgacaaatcccaaaacattatatcaccatctacataacccacaacaacaactgatccatcattagatgcccaagatacagagcttatatccttatcctcctcttcatggtctaatttatcatcagaaagctgaaccctagagtcatttggatcactagccactatttttctcttcaatttgatgtccttgtggcctctaacgagaacaattcgatcttcagaagcatcccagagtaccagcaaaccattttcatatgcaattagcagtctgcaaaatgacaatttcaagtaaatcaactaataccaaatttaaattcccttaagctttatgaaaacgtatgtacatgtgtataacagtgtatcttatatatgtgtgcatgactgttaaacacgtagatttattttgtgatgatgttttcaaccgactacaatcacttagcattgaaattgaaacaagaagtaacgccatgttgaattatatctggattgagtttattctccatgttgtatatttcaaacaagaagaaactcctagcaattaaaattgcattcgaataggataagtataatccattgccacacaacaatagtgaataaaactttactttacccccaaaacatggctaaagtattgcatatactttgttcaaacttcactatataagaacatttgatcctatggttataaatcaactgggttctgtggtcaaacctatctagatatttatgaaactctaacttactccgactcataatttagaaaatgcccaaatatatgactatttaatagaaaaatcaactagcctagatagagatgcaaaatttcctataactcatgtcacacatctttcatagaacataaggaaattaatcagagaaacttttaggtatgctcctgtcctgcctgattccatcagaacaaggttgatggagaactctgacaactgaaacatgatcaagtgacatcccaactgcttctgcataggtgagcaacattttgtaacatgttagataatagacttagagaaactgtatgattacccacgtgaaaaaaggcaatctaaattagatattaacaacatgcttatggctaggaagtaggaacttatgttacatttatgacataccaacaataatctgctccaataaggaaatttcattgaagctgatcacaaggcttcataagttgattaataaagatctatagcaatttataaaccatcaatgtggggcaatatatgaaaacaattacacaagaaatcgcccatgaaggacaacaccattaacctaaaactccaaagaattctttacctaatagttaaagctttttcactttatggtcaagtgattccttaacctagtataaaagcctctttgataaataaaaaattaaaaaaatcaacataaggtagctgtggatctgtgctttaatgacagctcaagcctaaatgaattttgcattaagggatatattaaagataaaaataaataaattcttatgtcatcccctaacagcttaaactttcaagtcaagtgggtgtagaacatctatatacatgtaaacatgcatggatattagcaaaatgccaaaatagaatattagatcctgtataatagcatatgcatttatacaaaatctcatgattagttataaacttaacaaccctgaactcaaaatctctctgggtgacacacatcacccatgtcaagaaagttgatagactacaccaaacatgcaataacaacatttctcgtgtacacaaccacaaggtcatctcaaaatttgtgattaatgggttccaatctgcatccagactccagagaaagttacccaatatcttaatcagaaatttggaacataaaatttctctcaccacacaccaaaattcaaaccaaagaaaaggtcaatgcttcttttaagccagcaacattggcaggtacaaaaatactagtcttgcttccaacctaaatatggtataaatgaactacaagaatgagtgcataccagatataacatttgtgggaacataatagggtaatattgtaatttttctgtcttcagaatcgaacatcaacacatatatcatcccatgctcagttccaatatacctgaatctcattaagagggcaaaaatgtaaaatacccatttaccaatattttcttagaacaagtagcatgcaaatgcagataaaaaatcatctgcacaagtattttacatgtaattggtgccataaataacagagaaagcagttatgatagattcccactgcaaggcagaagcaatttgtttgcttttcaaatcccaaacctgccattatcagaaacatactgagctgactagtgaatgaaactgaggaaaggggagaatgagagtaaggggaaaaaaaaactaggcacaaatgttaaccattttaaaataacaaaagcatccaaggaaagaaagttcatatggaatacccaaaaaacagggtaaaatatgtttttgggccctcaaaatatctcgaactttggttttagtccccataaaattttaatacatttttaatctctaaatttaccaaagtgatacagttttagtccctcatcaagaatacaaacatgtgtttctgttaaaatctaaggactaaaaatgtattaaatttttaaggcactaaaactgaatttcgaaatattttgagataccaaaaacatattttaccgcaaaaaattattactcatattcagagggtgcctggtcataaacagtttaaaagatctcatttggaagacccaaaaagaattataagctaatatgtaaggtacctgtatttcgttatcacttgagacgctggcaagaaaaccttgattttccaagaactgtgagaaatttgcaaaaagataagatataatattattcatgaaatccctcaaaatcatttcatgtctagagtttaataaatgtacaatgttagatcaataaacatgcaaatgcacatcatacacacactgacacacatcagtgcatcaccagtcaccacatacgcatattcaaagaaaaaataaaacaaaatatcgaggtaataaccaatataagattaaatgactgatgcacattactctttagtttcaagtttcaacatgaatccaaaattacgaacctctaaatttttgaagtatgcttgcttgggagagataagaatcccttcaatattgtcgccaccaaacacctttatccttccatcactacaggagggaagaaaatgccagagtcagctcaaaaactgtctagctctcaataccataaaggagtaatagtaactagtaataactaatgtactacatctaagctacatctaagctactcctcaatcatcacaacaaaggaataatgaaacagagattttattttatttttcaagtaaaactgttaaaaatacaatttcaaaagcacataataaaacataaaaatttcctttaataacattaaaaaaaaaaagtgcataacgtattataagctagttccaatagcatgaatctctatatactgcatagacagttttctaactaatgaaatttcatttcggtatcattagaaatcgagaattccaataaagcagaaaacatgaacagaacgtgttgttccaaagcaaagcaaataactcacagtgttcccactgctaatagacgttgaatgtgatcaaaagcgagaatagacgcagtagatggaacgccatggtgaagaacaactcgcggatcgaaattcggcgaaggaaaactatcttgcaccacgtcatgctgctgaacgacgcgaaaaatgttcagaaacaacgtcaatttcaggatttgcattcatatataaactcgtacgaatgcactattactattcaacaaaaaaacaaaaggtttccaaacattctgcaccagcattcgtaacagccagaaaaaaaaaaaatcgaagatgctagaatctgcaatgagcgtgaacagcgtttgtttatgtacctgagggcgttgttgcggtggagatttgtgaaagaatcgagagaacattgttgacgatgatccaatccaagagcttcttcttctggcttttgtttgtttgcttcctctgctggccaaatttgtattccgattttatgtttcttcgtgcagtgctgcttcatcttcaggtgccgtgggaatcaccagtatggtacatcgtgcacgtctgctccttccgattttttccccatcgaaatggacggtgatgcgaagcctgaagggtcacgtggacagtccgatttcaatcttcaaaggagattttgggatatgatctggagcaccaagtattaccagcacacgaaactcgaaagttaacacgggcccatagaaggcacgcactttgcttctctctccacctccctcctcttgaaaataaaataaaaacttaaatacctatttggttttttatattatttaaactgcatcaatttaatctccaacttagcgctgttagcaataaaatgactataatggaatcaattgaagtattttaaataatttcgggatttaattaatgcattaaaataatttgagatctaattggagctttaaaaatttggagactaaattgatgttttttaaaatgttagatatacatttttaatatgcaatttcattggttaataaattgataattaatcctaaaataagatttgtctttacttttttaaaatgttagatatacatctttaatataatttttttatacaattaattaactagaatttattcttgatataatttttaaaataattattatannnnnnnnnnnnnnnnnnnnnnnnnnnnnnnnnnnnnnnnnnnnnnnnnnnnnnnnnnnnnnnnnnnnnnnnnnnnnnnnnnnnnnnnnnnnnnnnnnnnnnnnnnnnnnnnnnnnnnnnnnnnnnnnnnnnnnnnnnnnnnnnnnnnnnnnnnnnnnnnnnnnnnnnnnnnnnnnnnnnnnnnnnnnnnnnnnnnnnnnnnnnnnnnnnnnnnnnnnnnnnnnnnnnnnnnnnnnnnnnnnnnnnatagttttttttggtcagttaagtattcacatcctcttgaaaatataaattaaatagaaattttatgatacttaaagtgattaaataaaaaactagaatatttagcaataatacataaaaaaaaaactaacaaataattttataaggaaaatttaaaaaactgtactgtaacgttttgaaaatgggacattgtggaaaattcttcatgtttaaaaaataacaaaatacaatttacaacaacgtatagggtgtttttctacctaaaaaagtattgataaagcactttgaccggtagtttttcttcttcgtctgattgataattttaattctaaatttttaagttttttataataaaaaaaaaaacatctctaatcagttggttttcttacatttttaattactagtttctaccatcaagcatgggcggatccatcttggagagaaagaggtaagtatcctcccttaaattttaggatgaaattaacacaatatacatttttttcaaaaattaacatatgacatatctatgggcggatctaatttattagttgggggacagtgatccccttaaattttgccattaaaattttaatatatcattagtacttgtttgcagtgcttaattatttttagtgtttgttatatagtttgcagtgcttgttaattatttttatttttaagtcatgcattagcacttgtttataagataattaaagtctttgctcttaattgaaatgagaagtacaatttaatcatatccatttagtctatattgtaacagttcatattcaaatatctcaaactcaatacttatatttaaactaactctcgtgttgtcatcatggtcttttgaaatctcatcgcaagttataataaacttcttttattgttctattcaatctagaatagtaatttagtctgtctgactatttgtttgttcctttagattataatttataattatttgttcatttaaaaaaaattacaaaaaaaatttcgagggcgctgccccggaaccctgccactaaatatgcggacataaataaatttttctgaatctactactaatatcccttaattatttttctggatccgtcactgccatcaaatatatagattaactaatacgaattgttctaactttatcatatagcttagattcaaatcttgattttatatttgaaggaaaaaaaattattgtccactataatctcacacgggaacatatttagaggggatgaacaagggcttagactccttccctttctttgaaattttttatgtatacacataaatttttaagttaattaatataaaattaattttgtatgttttattataataatgattaagattagttagtgaaaatctgtgtaaatttagttgtatttgttatttaattataatgactaaagtgataactagtgtaaaattgtgtaaaactagttatttatttattgttattatgataataattaaggttattatcatttaatataaaaattaattttaattttatgtgtaaaaatagaatttttcttaaaaaatattatttattgaaaattagatatttaaacaattataaagaaagaaagaaaaaattcagccccattttataagatatctagatctgtctcttccgcatatagttaatcagacttaaaaaataaaaagtctgaattataataacccaaaaataattatattttggtttgttttcgacctcatagttcattaattatgttgggtgagttgcaggctgtgagcaatccagacagtttaaaccgaaatgaacaaaaaacaagtaaaagtttaaggggtgtttaaatcgttataattattaatttttattaaatcctaaactagaagtgaggaaattaattttgaaacattaagaaaacaaagagtttaattaaaaatgaaatagaaaggtaaataaacaaacagttatatattgcctttgtccaattgtccaattcaactaccacctttgtccatggcctgcttgctgccacgagagacgcatctttcctcataaaagggcacagggctgccactaactatcagccctaaacttgcatggcttcaaaagctaccatttttcttgcaaccacaaacacattgtttaattatgcaaaatctgccacacataaaataatgaacatgctgggttagactcattgtttcaatcaatatattccccattgtacttgaataattaagtcctgactattcccactgttccttgtctcgagcctctttagtttaagaacactgactgctagacaccataccaaacatattactttgataagattatacaattatattttaatatataaggtaaggttaattagtaataaaataataagaattatgcaatagtgggaagttgtttatattttagatggtatactatatattgaaataatttggtaaaataaagtatatcagttatttttaatttatttaagatttttctaaatttaatttattttgtaaaaaattaatatcatagttagatcaataaaatttaatatttataaaattataagaaaaattatatattttactcaatttaatatttgatattgatttttctatctataaaaaaatatttgatgttgattgattttgtcattatgaatattatagtcatcgttttaaatatatatctattgtttgtattttattataactatcctgcatctcctgtgcatttatatgataattatttagaaaaataatttccccctaataaatacagttaaattataagataaaataataatgaaataataattaattatatattaagtaggttagtaatttatataattttgaaaaataatattataaacaatctaaattcagagttgttggtcataattaaaaaatcaaaataaaatctttataaaataatagttttaattatgtatttttaaattaaaacttaaattcatatgacgcgtatcattcataacatatatgttgatttctgaaaaatgatataaaatattttaaaattttgaattatgaattataaactaaaattattattttatgctatatatatcaataatatataaaaaatataacaaatttgaaggacaccaaataatgttattattcataattgacaaagatatttattcaaatagcttaaatataattttggtcctcatatttttctcaatccatattttttattcttccattttaaaatagagacatttgatctatctattttaaaaaaattcattattttttagttatttatttcaaaataaagatatttgatattctcatttcagaaaaattacattttagtcaaatcctcaatttttcaatgctttatttcttttattttgatatagtttaaccttaatttaacctgacatattcattttaaatatcatnnnnnnnnnnnnnnnnnnnnnnnnnnnnnnnnnnnnnnnnnnnnnnnnnnnnnnnnnnnnnnnnnnnnnnnnnnnnnnnnnnnnnnnnnnnnnnnnnnnnnnnnnnnnnnnnnnnnnnnnnnnnnnnnnnnnnnnnnnnnnnnnnnnnnnnnnnnnnnnnnnnnnnnnnnnnnnnnnnnnnnnnnnnnnnnnnnnnnnnnnnnnnnnnnnnnnnnnnnnnnnnnnnnnnnnnnnnnnnnnnnnnnnnnnnnnnnnnnnnnnnnnnnnnnnnnnnnnnnnnnnnnnnnnnnnnnnnnnnnnnnnnnnnnnnnnnnnnnnnnnnnnnnnnnnnnnnnnnnnnnnnnnnnnnnnnnnnnnnnnnnnnnnnnnnnnnnnnnnnnnnnnnnnnnnnnnnnnnnnnnnnnnnnnnnnnnnnnnnnnnnnnnnnnnnnnnnnnnnnnngtgttattatagacgatgaattattctttaatttgtagagagagatgtttttttgtatgttcatgttaatgattagaagctctaaaaatatcaatcaatgactactatttactagaatatagagatttcataatcaaagtgaaatagtatgcctttaagaactatcaaaatagatcttccattttaagtaatgaaatcaaataaaaatttgttgtaatttagcattaattagagaacccctcagtcaattataacaatcgttgaaaaaatgggaaaaaacgagtgctccaaattatgatttaacgaaaatgattcttaatctccacacttcattttcttatttaagttagtaatgaattaatcacataaaatttggatatgttggtcacaatctagctagtatttagaggaacctctcaaccattttcaataattatttaaagacaaaaacagatcaatttctggcgatcgagatttcttcaaaatttaatgcaactataacaaaaagattatcgtgatatagaaacagaagttacgtgactaagttttttttagatgatggttacgtgattaagttgaattaatagaaaattaaaggtcaaaatcaaaacgaacctagaaattaatgttatgtcgatgccatatgttgaacaagcatagtgtcatgacatacgcaatctcaaacaaatatattgtaattaataaattttagtcacatacgtgtattaatcaaatataaaagatttataattaaacataaaaagttataattataattaaaaagaaacttatttaaacaatttgatgaaatgaaagcgtttgactaatgtggccaacaaaatcccaaggttgagtgattgaataacacatgttacaacaaaatcccaggttacattcaacttttttaaacaattgattaaatgaaagtgttactaaacaagatcttacccacatcagcaatcaaatgtggcatataaaaaaataaaaaagtatcatataaataaaataaaataaaaagttaaataaaagtacataactaaatttaaatagaattggtaaaaataaaaatattggatgggaagattaagatatgactgtttatttaagaaaatttaaattttaagaattaattattttccttaagctatttgaatatgtaagttaagaaagtaattattttttaaaataaattaaagtaaaaatggaataattgtcaatatggaagagatatactagtaatataattaattatgctaaattaaaatctgcaaaaatgaaaatttcattttatgatcttgccaaatgcgttaaaaaatatcccaatgttgtatagtattttttttttttttttttatagtttcccaatattgtctatattgcctgccaactccgacattgttaactagattgtctcattttgatcaatcattatatcaatgaaaaaaccatatcagacgtcctgaaaaaatggaaatggaaacgggcccatcacacgtgtgaatcgtcctttgttccgcatatttcgcacgctcggacattcaccacaacaacgagcccaacatataagaagacccacagggtcccaatatttcacactatttcttattaacatattattattctctcacgtaatggcgtcttcaactcaagtgccaaacctcttcggcagcgccacctcagctccgccgccaaccccggcggcgcaccacgacaacatcatgtcctcctccgacgccgccgacgcgctctccagcctcctccaccgcctcccgcccacactctcccttcccacgcgcctcccctcgccttcctccgcagccgccacgtgtcccccctccctctccctaaacgacgtattctcctgcgtttcaaaactcggttacgcgcaactcactgatcactcagtcccctccgaactcgccaactcggccgagtcggaggcgctcgcgctctttgacctttcccaagaacagaaggactctctcttccccaaaaactggcctctcggatacggcggcgacgacgaagatgagctcgccgagtcgttccgcttcgactcggcgtgttcgaccgagtcgaacgagttggcactctcttccctgcgcaagtttgcgcgtgaactggagaagctgggtttaaagatcgttgatgggttaacaaaggacttggggtctgggaattcgcttggggatgacccgacccggttatgttcggttctgtgggtttcggagtctctgcccgggaataaatcgggtggattttacccgtttgtaatcgggttgcagtaccagataaggaatcagaaatactcattgctgtcggattcgggatgggtttctgtgctgccacacgtggactcgattttggtcactgttggtgacattgctcaggtaaattattattttaattaattaatgtttttgttcagacataatgactgtgacttcttaattactgtaactgtttgctttatgtttttggatatttgttatttttgttctctgatttattttatatttatatttatatattgatagtataaaataaatctcataatgaccgttctagggtctcatcaggaaggatattaccgtaccgattgtattttatctaggtgcgtattggccaaatcatactgtttggatcaagatttgacccacaggatacatagtttcctagcttaaagcaccacttgtgtagggattaagtgcgtagatcgacataaatccaactcttaagatatataaattgtcattcaattactaatcatcttttaaatgactttaaaataattatttttaaaaattaataatttgtgattcaacagctgtgtaaaactttttacactttaatacataaccatttttctcaaaaaaatttctcctagttatggtttgggggaaaatcggaaaagcttgtgtataagcttgttagtttgttaggtaatcatggtggctagtataaaattatatatttatgatttgtaatcactctattgtcccttaggtacatccatagtttaattttgacacctgtatgtataaattgaagtttgaacaaggtttgaagacacaaactgaactaatcacgttttatttgaactatgtgatttcacctaatgagacaggcattcaggcaatattagttatatgaatgagtctattttggttgttatacttctttacactttattaatttatttctgcatgtaaacattgttagttttagtacaaaaaaatttaatatgttttgttactaatgtgtatagccatactaacgtggttgacagtgtagctgttatgatcgctacaaaatttatggaagattacaatatttatcacggtttaccaattgttagaaaaattctatcgtggaaagaattttagacggcttaacaattgctagatttttttgggattttatatagttataaattttttgcatggatgttgcaatggctaaagttaactttagctaagttaaaaaaataactaacattagaaaccaaattacattgtatttactttttcaaagactaaaattttcaatttttacataaaggtcaaaacagtaaagtgcaaacaaattaataattaagcccttcttttttagtatggagtcttcttttagttgttgggtcacacgacaaacgagagaaatgttgctttagtgatttcattctacattattttatagttttaataagagtttaaagtgaatgtattaacagtttcttattaattatcatttaaattattttaaaagtaaataaatttctcatagaattataattaaataattatgtcaaaaaaattatgtatcaatatatatttgtttttctcttttaagaatgataatgaagttataattaaaatattttattacgtatgtgtaaagtaaaataatcattgttcttttcggtcaaacattttggcacgcaaattctgatttgatcctgcagataatttatgttagttgggcccccttctttagcaaggtgggtaactatgcagaatgcactgtttagcaatgtccctatgtcggggtgtgtctgttcttcatttttcattgggtgtggcctaaagtagaaaaatctccaattcagctaagaaaaagtggactaggcaaaagcctcaaatctcaaatgttataccacacatcgtttcctaagaatagaagatgaattcaatttcatatggaggaaaaaaatcatatacaatgccccataagtgtttttgtgagtgtggtgccttagtttcttagtagttggtttcatatttcttgaaaagtttaaaagattcattatttgtacaattttgtatcgtaccatcatgtatcttttttataaattattttattttgaagagcacattacattaatcctaggggtgatgcattgataaagtgggctactatatgaatttaaacaattactgtgtaggtgtggagcaatgacaagttaaagaaagtgagaggcagaccaatggccacagtgggagatgaaaatggttcacgctgcataacaatgtcattgttgataactcttcctacagatagcagagtggctccactccttcccaaggcaatctgcaacaaggaccaaaaggaagaagaagttgaagaagaaagcaatggtggtggtcaaaaactagagaagagggtgttcaactcttttgattttgaggactatgcttggagagtgtaccatgaacgcatccttttcaaagatccattggataggtaccgtgttgcttagaagttgttgtttaattgatcttctcagccattgttttgtgtgagattcattaatttgtcatgctagtgttagttagtctagtaagatttgaattttggatgggtgaaagggaaatatgagaggactacaataaggagatgtatatcatatgctccatttatttattggattgattttgaagttagagaagtgtcacttattttttactttagctttcaatcaagaattcagagtttgtgtcagttactctagggattggggtccaactctgtcatgccgatattgacggaacagtggcttcaattatatatctttcaatgaagtatcattaaatattgaatatcctgatagaatatctatctatgtatgtttttatgaaagatgaaaaaaattgggttttattaattagttttaaaaagtaacgataaaagaacatcaaatatacttcataaatacttttatttacttttaaaagcatatactaatattttttttatatttgaaataaaataaatatttttcaataaaagattcttattctagttcaaatttcgtacattatcattgcaaagatttttatattgttaattacttaaaaataaatttaaatatcattttttaaaaataattattataaaaaaaaaacaaattcagtatgtaggccaggtaatctatgataggatttttttttttatggggaataactcattatttcaataacgacttgctcctcagtacaagatgataaaatatcaaagaaacaagaatcatcatgagatatagaagtcgtctgttaaaaactatgagcaactaaatttacttgtcacgaaataaagtacactctagcatgaggtagtgcttgtaacaactgcgtaacaatgacaccaaattcagaaatgtcttgcctacaactatataggttgttgacaacacgctgattatcaagctcgatcacaatgtcaagattttgaagccataaaattgcttccttctcttcatggacctgcggaataaaaggtttccaatcagagaatgcggtttcaaattgaatttggtcatatcttatacaggctcccaagccccatcacaaaactgctacaattttttacactattagtgtatttaaattaaattcaaataattttttgttcattcaactaatatgcttaaaacattagttaatgtttgttaatataattttatagaacaatgctggataatcgtataatgaaatgtcgaagttcaggtaactactgattgaaaattctaacttacgtatgggtgggtagtcatgggatgtatctttacccaatagagttatttatttatatctaaacttaaaatccatttgattaagatctaatgatatatagaatataatcaagtcaatctgatttattgatataatatatcaaccttaatattatatatagttaaattgtagaattaaagaagtatatatttacaattaatgtatattttacaatatattttaaaataaataatattaaatatagtataatatcatgtcaaacaaaatattgtttattaaactaagaagttatattattaatacataattgataaaaaagatttatacgtttttaaaagaatctaagatatcgaactaggtttgaacaatctgaagtataacttgtatccatccttaaaatatactgattttaatttcttaaaagtaatttcaagtcagatcaaattaatggaatggtatggatcataaacattcctgattctttgggttaaggtacacaccaaggttatttaccatcattattgaggagaatgtgtattaaaacttgctacgatcttgtaatcgttttcatctaaaacagctttcagactccaactaccacttctaccattctccctgtcttcagattcactactagacgtcctttactcaagtgcctttgatgacatacttttttaagcaaaaatgtttgatggatatccattagcctatcccacacctggaaagagagataaaaaaaaaagagaaagagatagaaaaaataagaaatataatgaggtgtttaaattaaaatatatttatgtattattacttaatttttttaagaattgctagttgctactatattctacttggagttttcttttgctcacgatttaccagtccaaaacaaaaccaaggtccactcaggcagggtggggataaacttttaataaaaaacgaacaaacgaaaatgtggaaaaacaaaaaagcccattcttatgtgcaatgtgtttggatttgaaggtactaaaccagagaactaattgcccaaaaataaaatggcaaaagaaggggttcttaggaatggacttctctcaggtagagtcgcaccttagagaataaactaatttgtaataataaattatttcaattaacaaactttcattaaaattatcatatcagatttttatttaaaaaaataaaaagatattgaactaaaatagaaaacaaaatatgcctgcctacatcgcctactcatttgacatttccatggttttgcagaaaaacaatcctcatgcaatagccacgatttacttatatgtaattaactttccttgccattcatactaaaatattatttacttttagtagcaattatatagtagcaataaattaatgtctagtagtactacaactttgcgacaaataaatattagtctacaaaatgttaattcataggaaaatatatttttttggacagaattcatagtaataaaagctaataaaatggagactttgaaattcaaatacaacgttatcaacactatgttattacatattttccttaacatttttttctatataaaaaaataggagactttctttctcctgtacttccaaaagaaaaaattgtaaaacattgaaattaaaaaaattatcgattgttgttttgnnnnnnnnnnttagcatgagacataagttggcgttggaccactttgatttttttatattattattagtgctcttttccctcatatacctttatttatttccccatgttagttacgattaggtgatcatcttcaacatatttatctaaggggtcgttaatatttttaggatcgacaagtttggctttaacagtgatcgatgttgccgtttagctaatatgatgtatacatctgaaagttaatcagatgttttggctttgatgctttcggaagtttgtctttctaacgatctgcttataatttatatatgtttcccttcaatgcaaagcttgccaataagttaactagcacacacatgcacctattgatagggggaaaaagaaaactcgagtctctgattaattcttacaatagaatgactgaaaaataggagaattagatgtgagaatgagtagcaaattatatacttattagttatatatattcttcctgtaaaggttgcattggaatccaccccttgagcattcttttggattatcaaacaaattaccatgatcaaattaaccatcaagactataccagacagacgttaaaacatatgtcttgtttggtggtaatatttaaacataagttattatgttttaatttgttgtatatgaagatgcgataaaataaacttatcctacatgttatttagtagtataaaagnnnnnnnnnnnnnnnnnnnnnnnnnnnnnnnnnnnnnnnnnnnnnnnnnnnnnnnnnnnnnnnnnnnnnnnnnnnnnnnnnnnnnnnnnnnnnnnnnnnnnnnnnnnnnnnnnnnnnnnnnnnnnnnnnnnnnnnnnnnnnnnnnnnnnnnnnnnnnnnnnnnnnnnnnnnnnnnnnnnnnnnnnnnnnnnnnnnnnnnnnnnnnnnnnnnnnnnnnnnnnnnnnnnnnnnnnnnnnnnnnnnnnnnnnnnnnnnnnnnnnnnnnnnnnnnnnnnnnnnnnnnnnnnnnnnnnnnnnnnnnnnnnnnnnnnnnnnnnnnnnnnnnnnnnnnnnnnnnnnnnnnnnnnnnnnnnnnnnnnnnnnnnnnnnnnnnnnnnnnnnnnnnnnnnnnnnnnnnnnnnnnnnnnnnnnnnnnnnnnnnnnnnnnnnnnnnnnnnnnnnnnnnnnnnnnnnnnnnnnnnnnnnnnnnnnnnnnnnnnnnnnnnnnnnnnnnnnnnnnnnnnnnnnnnnnnnnnnnnnnnnnnnnnnnnnnnnnnnnnnnnnnnnnnnnnnnnnnnnnnnnnnnnnnnnnnnnnnnnnnnnnnnnnnnnnnnnnnnnnnnnnnnnnnnnnnnnnnnnnnnnnnnnnnnnnnnnnnnnnnnnnnnnnnnnnnnnnnnnnnnnnnnnnnnnnnnnnnnnnnnnnnnnnnnnnnnnnnnnnnnnnnnnnnnnnnnnnnnnnnnnnnnnnnnnnnnnnnnnnnnnnnnnnnnnnnnnnnnnnnnnnnnnnnnnnnnnnnnnnnnntctccccatttttaaccttattgaagaagtgagttatgagctgatcgacttcctaacaaaattatatattaaatctttagcgagtttaaggagttcaagacaatcatttgtcgtaacattttataaatgaaaaatttaggtatagtatttaagagatttcatttatcatgagaaaatccataggtgttagttcagttgaaatagttttatggttttgagtattgaattgtccaagatatcaaattttcaaagcttgaattagtcattcatgacaaattttgactaaataacttatgcttgcacagttataatggaagttaacaaaagatcgattaaatttgacacgaaattgaaacttagaagaacaaattgatcttaaaaaatactcatatattttacctctcagatccctagattcattaaatgtcaaagggtgcaactatccacgatgtttcttgcatgagcaaatccgaggcaacgatcgtgtcaatgttgaataaattatcataagattgctggaggcttaattaagccgatcgaggttagtaatagaaagtccgtaaatctgatggctctagattttccttccgaaaatatctggtaaatctaagaatattcagtacattctattatactttttaatcatttaaaaataattctaaaagaatttctatattttaaacatagtaaatacttcttttattaaagttcctgcatttaattttgtctttcagccggtgttcttagactgatgtattcattaagattagtttgtctgcatataattaatttaagaataaattatgcatgctaaatgtgtgtctattaattaaactcttaatctaatactagtattttttatccaatgaggttaatatagtataaaatctcatatgaaagaataatttatttaataaaataatttatatttgacagtaaaattttattgattagttataatcactaatcactcattgatgtaaacgaaattaatatgtgttccaataaattatggataccagtgatctatggaatccatgaccaaaatactagtatgtttttttttttcttctcttttttggtcgttttaaattagttgacttattaacttgttgaatctacactctaccgttggagggtggttctcaaactcaacacaactctctcaccatcaattaaagttgccttgcaatctcaagagtgaaaactgaaagacagcaacattgtgtccaccaaagagcctcacaaaaccaccaccaccccttcacctgactgagactgctaccaactttgtttgaaggctttgagatcacgtattgtcccagacacaagaattaagaagatgttgaaagtggttactaatgcctcacaaaggaaccaaaatcacaacaaataaaataaaataaaaatagatcaatagatagatagttccctagcttgagaattgagaaatacaactttcccttcaccaataacctcttgaaagacaagaccatttcaccaaaccttaattaaacgaacaaacccaacctaatactactacttgaattaatttcaatgtctctcgttgctatgatccctatatttctacctctctttgcttcttcttttctcagagattattattgttattattctgatatcatttcctctttcttcttcttcttcttttcccccccatgcagcctcttcgaagaaaaactcctctattcaccacctcagaaatgggggcaatgaagggtcgcaagaacaacaacctctccatcttcgtggtggtgttctccatcttcctctttgggctcttcatgtacaacgaggatgttaagtccattgccgagttcccattctcgagtcccaaagcgcatgaaacacaagaaggaggagaacctagtaaacatgttgattctgttcaagaagacagtgttgttgttgttcaaagggagagtgagaagaaggacgtggaagacagtgtcacagtgaaagtttctaagagtacttcaagggctcagctagagaagagtggtgctgaggatgaggattctgatgagcgtgttgatttgaaaactgttgtggagaaagagaagaagattgaaatgccacgtgcggaggaagaggaagaggtggaagaagaagaagaagaagaagaagaggaaaaagaagatgagaaagttgagttgccaccagaagattgtgacttgttcactggggagtgggttttggataacgtgacacaccctttgtacaaggaagacaagtgtgagtttctcacttcgcaagtgacatgcatgaagaatggacgacctgattctttgtatcagaattggaagtggaagccaagagattgttctctgccaaagtatgaatttttgttcttttatttccttttttttctctatcttcttagtttgtgttttttttagtagatttgtttcttattggttgtgtttttgtgatcttgttaaggttcaaaccgaagcttttgtttcagaagattagagggaagaggcttatgtttgttggagattcactgaataggaaccagtgggaatcaatggtttgtatggtgaattctgcggttccttcatcatataacaagacctggtacaagactggttctcttgccatcttcaaaatcgaggtttgtaatttactttctcctttttctcttgttcaagcaggggtatatatgcctgaaaacaattacatggtttaggactaccgtgtcagttttaatcaatttttatgttacattgaatttttcaatttacaaaaataattaataaaattcaattacatgttaactgaatgaagaatgattcaaattatagtagtttgaacttggtaataatttctcatatataccggtttatttgaaccaatccgaaatcataataatgaatttgccataatgattaagcacaagctataatagattggtaaagtactgttttatcttaattattttttatctttttgggctagagtaagtgtaaaactgaaactaaagttaaggtttaattcagttggttaactggatgtgtgatttattataatttttttaatattattgtcgattcctacctataaaaaaaaaaatattttaagtatgatggtagtgggccactgaatttgatgaccaaatatgggttttttaaataccaagttacctacttgtttggcctttgtctgaaagttctggctttggaagattgtgccaatctcttggtagttaagaaaggacacgctgcgtagggagtattcaattactaatattgcttaggatacactcctgttaagtactagctggtcatgtttgtgtaggagccagagcacgttaccaccgtggaattctattgggcacctttccttgtggagtcaaattcagatgatccaaacatgcacagcatattgaaccgtataataatgcctgaatcaatagaaaagcatggaatgaattggaaggatgtggactacttgatctttaacacctacatatggtggatgaacactttctctatgaaagtcttgtaagcacatgattaactctatcccattaatttctttcctttcttgaagatttcgtgattttcaagcaaattcatgagtttgtgtaattcttgggtgtgatgcaatagacgagggtcatttgatgaaggttccacggagtacgatgaagttcctcgcccaatagcatatgggagagtcctcaagacatggtcaaaatgggtagatgacaacattgactcaaatcgaactaaagttttcttcagcagcacatcccctcttcatatcaagtaattaattaatgactactacatcttaatttatgtcttttcatttttgaataatcaacaaacattgatttcataatacgaatagtgatatagacacaatgtatcatataaataaacacattcagatataataaaatttaagtctttctgtctttaagtgttgcgtcatatccaatataaaatttttaagtatctttaatgatacagattaattgtttttaaaaaatgttcatatacgacaaaaataaaaattgtatctaattaatctcatttgttacacactatttttttcctttaacatcattttttactagtgaatgaggtgaaaatgatcaatcaacatcacataaatacatattattcaccaataatttagttttaaaatgtttgggttcatatttggtaacttgaaatatccttttgttattttaaaaaacttatctactaattcattccatggttagttgacaccaaatagtttaacccccttgcaatcctccataaacaaatcaatgtgaaaatacaacatatttgctatgccattaagtgggaccatatctggcataaactacttaacagcatgcttggagttttcactttctagttggtgaccctttaccacattttttttcttttttacaaagtttatagttaccaacttaccatgtgtacctaacaaactaagaatacttttgaacacactttgaattcaacattaacatttaaccatatgattttgtaggagtgaggattggaataacccagatggtataaaatgtgctaaggaaatcattccgattctcaacatatcaaccccattggatgtgggaacagatcgtcgcctttttgcaattgctaacaatgtgactcgatcaatgaaggtgccagtgtatttcattaacatcacttctttgtcagagttgagaaaagatgcacacacttctgtctacaccatacgccaaggcaaaatgctaactccagaacaacaagctgatcctactacttatgccgattgcattcattggtgtttaccgggattacctgatacttggaatgagttcctctatacacaaatcatctctcaatcttgacctacaacaaacaacctatagatatcttcacacacacttctattcctttttccctctttccttaattgttattatttctccttttacttatgaaaaatgctcctttttccattgaatgcttcaagcatttgtttcagtttttgtaatttttagtcactttttattgacttttttttttctttttaggaattgggcattttttcccctttttttcctcatgtttctttgttaagccaaattagcaagtacggaagctcagcaagatccttaaatgtacaatgaatcctttctccttgaatgaagaaaaaataaagaacgaaggttttgtttatagtttctaaatagttgcatattatgatcgtacgtctgtacacgtggaaagtaagataacttcgattataaatattgcgtgtaatttagaccaaataaaaaccttcctaataacttgattatttttggataatagtaaatagaaacaactctgctaaagaatccaattaaaaccaagaaatataagcttgtctatcatccacaccagaataaatgaaatcatatttacaaccctttagtttataagtttttaacaaaataattctagaattacataaaaaaaaattatttagaaattttgtgtaagagttgctattaaaaaataaaggtaattctacaattcttgaaattttaacaagcacctatgaattaatattagtatatcactggctattgaatgacttgtataagtttggatgcaaaattcaatagttgaaaatgcaatgataccaaaattgatatataagaaacatgaaaaagacgacttgtttgtaccagatatagataccactagtgttcatcagattcatcacgacttgcttgtactcgctcaaagcagttccatggacgcatgcatggctatacaaactagtaaacaagagttcagctgtatatacacatgcgtactcggtttccagggacatactctcaaatctcaatgtcaatttggtttgtggaacaggaaagtatgcaaagggataaacttgtatgagcaaaaatgctttcgcagctacagagatgtgaagactgctatacattagtatttgcaaaatcaaaagattacagctgatatacaatcataacaaacatctatctatctcgctgatcacatgaatgtgagttcttggaaaaaacagacgcaagatgggaactgaagatgacgacataagcttaggtttgactctatcaacagctgtcctaattgcagatgaagatggtacatcaaaccactgaaggaaccaagaaagaagtattgaacgtttatcttggaattctccatcaggccattttcccaatttcaaatagttatgaaaatcatccttcaattcctgggaacaatttaggagctcctctacctgcttccgtagtgaaccgacaaatgttgattgcacaattcctccttttggagaagataattttccagtcatcaatgcctcaatatatgtcagtgcaagctgcaagcagatacaattagcatcaagtcacacatactcataaggggtgggctagtgacctagtgaatgagactcgtaaaattcgggttcgcgggtggcccgtaccgtgaatacccctaataacctatttcttgatcataaaatccaagagaccaatcgcaaaagcccagtagtatcaaatcagagagaaagcttattacttgagaaagcttagcataaaaccagtttagagaaagctaatacttgaaaagaaagtacaattatcaagactaagcataaaactaccttaaaaccagatatagagagtgagtcaccaaaaacaatggcaccgttagtaacttgttcagccatcgattcaacagttgtgtataatgataaatatacctgcataatagagccatcaattaaataatatcagaatccaataataaaaaatgcaaactctcattatctaatggtttacagcaaacatagacattagaccaaattttatttatttacacaaatacttataaagaatcaagcgtctcagaagaaacaattcatgtcaaatttttatatcatgtagatcatgctcataaaattccatggcatttcataatttatactgtaataactaatagtaatttagtacgagattaccgtcgtggaatctaaaacaggagagattattgactgcttgaatatttacttacggataagcaatttgtttgaaatgccacatgtatgatcaacatggaaacacagccagtatttaagtttttagattgggtcatcattgtttattgaatttagggaatacaaattaaccttctaagcacattacctgtaacagagctggtctatccttggtcacacactcaaataatacttgcaagcagaattccttgaaatcaacatcagatctgcaagcatttttattagtttatttagatattgaaccgtctttacaacaaaaggaatgtaatactatcttcaagaagtctgcataattagttatacttgaatcatctttgacttatcatctatgatcttctataaaaatcttgggaataacaaaatgtaaatgtaaatggtttaagaacccaaaagagaaaaggaaaagaaaacctttctgaaggaaagccctcaatcaggcatgtctagctgattatgatgaaaagataaatgaaagtgacctttccctccaggttactttcagcatgcaacatattgtaattgtgtgaaactatagataacaaatgaggctcctgtacagtccattcaatcactatacatggctaagatgatctgatctgaccaataaagtttatgcctctatatcttggaagtttgaggtagtctccaatttgaatataaatttgactaaatggtatttcaggtttgaaaaataagttgaccaagactaattatgcctctatattcccagaggtgtatagctcatcggatagaggatcatgatcaattttgttcaggtgctggggatgataacataattcattgagttaaatgggagatctgttgcaggcccacaaatgaatgtggatagatcctgataactagctgtccaaaaacattgccatggcatttttctagagataaatattgtatggcacattaatttgaattatatatgatccttatccacagtttagatgtcaaagtagcagtaaatgacacttgcaagcccttggaatttttttccggacattttcattttataaatccagtttcattatcaaggattttgggagaatgggtgggtgatgcccctttctcagcttttccacatcgttttcagctcagaccccacnnnnnnnnnnnnnnnnnnnnnnnnnnnnnnnnnnnnnnnnnnnnnnnnnnnnnnnnnnnnnnnnnnnnnnnnnnnnnnnnnnnnnnnnnnnnnnnnnnnnnnnnnnnnnnnnnnnnnnnnnnnnnnnnnnnnnnnnnnnnnnnnnnnnnnnnnnnnnnnnnnnnnnnnnnnnnnnnnnnnnnnnnnnnnnnnnnnnnnnnnnnnnnnnnnnnnnnnnnnnnnnnnnnnnnnnnnnnnnnnnnnnnnnnnnnnnnnnnnnnnnnnnnnnnnnnnnnnnnnnnnnnnnnnnnnnnnnnnnnnnnnnnnnnnnnnnnnnnnnnnnnnnnnnnnnnnnnnnnnnnnnnnnnnnnnnnnnnnnnnnnnnnnnnnnnnnnnnnnnnnnnnnnnnnnnnnnnnnnnnnnnnnnnnnnnnnnnnnnnnnnnnnnnnnnnnnnnnnnnnnnnnnnnnnnnnnnnnnnnnnnnnnnnnnnnnnnnnnnnnnnnnnnnnnnnnnnnnnnnnnnnnnnnnnnnnnnnnnnnnnnnnnnnnnnnnnnnnnnnnnnnnnnnnnnnnnnnnnnnnnnnnnnnnnnnnnnnnnnnnnnnnnnnnnnnnnnnnnnnnnnnnnnnnnnnnnnnnnnnnnnnnnnnnnnnnnnnnnnnnnnnnnnnnnnnnnnnnnnnnnnnnnnnnnnnnnnnnnnnnnnnnnnnnnnnnnnnnnnnnnnnnnnnnnnnnnnnnnnnnnnnnnnnnnnnnnnnnnnnnnnnnnnnnnnnnnnnnnnnnnnnnnnnnnnnnnnnnnnnnnnnnnnnnnnnnnnnnnnnnnnnnnnnnnnnnnnnnnnnnnnnnnnnnnnnnnnnnnnnnnnnnnnnnnnnnnnnnnnnnnnnnnnnnnnnnnnnnnnnnnnnnnnnnnnnnnnnnnnnnnnnnnnnnnnnnnnnnnnnnnnnnnnnnnnnnnnnnnnnnnnnnnnnnnnnnnnnnnnnnnnnnnnnnnnnnnnnnnnnnnnnnnnnnnnnnnnnnnnnnnnnnnnnnnnnnnnnnnnnnnnnnnnnnnnnnnnnnnnnnnnnnnnnnnnnnnnnnnnnnnnnnnnnnnnnnnnnnnnnnnnnnnnnnnnnnnnnnnnnnnnnnnnnnnnnnnccccccccacccaaaaaaaaaaggatagcaaatagcagaataaccactgttatggatgagcaatcagagttttcccatctttacaaaaacaaaaacaaaaaatctacagccagatatgattccaccatgtatatgaaagtcatacttagatttgttccctttgcacaaatcaaataaaacttaaactgttaactattcattaaacagcacctgatcagttattcatcaaaagatttaagaaacatttcataaatcaaacaagtagaatgaaacagtaaaaacatgatcaaacagaacatggatgtcaaaacaatctacaaatatgagcttacctattataccaagaggggtcacagcagagttgtgcaaaagcaatcaaactaggatcagatgagaaggtaccaaccaactgatcaactgtgatagaaccagatccactacgaatgtccatgattgtatcagatgctttcaaacttgtcaggccaaacacctagatcaagcaaacaaataaagtgggttttaatacctgtataaacatgtgtagcagtatcatacactacgtaatttcaaccttgtgcattgcccgtgacagcagtgactggcacccaatgggatcatcaacatatgaacaagctccaacctttcttttgatgaaaagaataccagaattaaatggattattcttgtctccaaaattccaccaaggtttatctgttataaatgcataattggggttactcgtttaaaaagtatataattctaaaagcctcatatcagtataagatcacagcataatagtttatgtttaccttctggggtaaagtctaatacttgaggccagtagcgaggcccacaaacacgtattcttttcaactgtaaccatcaatgcaaatacaaattagtcctacaaggttacaaatgcttttctttgcttcaacaataagaaatatacaactccaaaagctatcaaatagaagttaattcaaaccgaacaggagaattgtgaaccaaaaaaagataaactgaacaagacaaatcaaagtatttcattcatagagaccatccaaacactcagacttacaattgatcgttctggcagaaggcaaggggtgacctcgcaaaagctggactctgcataatgctcagtttctctgactgtgacttcaagaggagcataaacaggcagaccagtgtcaacatcaactgtttgaatccatcgtgcctctgttgcaaggacatagagatggcgaaatgcctgcaaaaaaacttttttcagaacttaattttcaacagtaaactaacaaacatttaagcctttatcacgagtaattccatcaatctgaaatacctgaaggtggcatctgttatcatttggaccagttggcaagcgtggatatagagtaattagcaaagcagcaatggaatggttgtttgttgaaaatgttctcattccaccaccaagaaacaagaaaccagtagctaagcttacctaaaacagcaggtttataaaacaaataacggagactgaagaaggtaattaccaaactcatgtgaaaaaaaaaaaaaaaattagcatctacaagatgttgcgtgaatatagatcatgtaatgatgtaaataaaatttgttttaccaaattaagtacaggaacatatgaatttcaaattgattctttgatattactatcataatacaagatatctgaatcaccaaaagccctctgattgaagataatttttcactgattcttttatctaaagcccaactgctaaacacaaacatttttgcataatataggcacaaaacttgtggacatgagataaaaagacattttgaagatcattagtcgcttagcataatggtaccaaaccacctccagccacttaaggtagggcagttcaatccccagccccctggaaattcaagttccaaagccagcctctcatatatatcaagattttattctttaaaataatgaaaattaaaaaaatcaaaagacaacttgcagaacttactgccatctgaataccataacttgactgcccatctgcacaatttctgctccttaggaatctcaacaaccgaaaggtctgtaaatgtccagacccagccataacctggtatgcagaagtttaaccatagaattttagtcatgatcttaatcaataattaattgacaatggacagaaggaagaagcaggtaccacagatagagaaagaacaataaggtgaaggcatgtttccaatgtgccacgatcgatgtagcgagacagtccctttgggaaaacctttccacatgtaggagaaacaggcttcatctgcaagacaaaaataaaccatctaaacctaccacttcacatgcatgggggagttaggcagcataattctggactgacctcgttaagaaagtaaatagcaaattcataaagtaattcctgtgcactttcatttcttgtgccagcaaacaccagtcctgacaaggttaagaagaataagtttcaagacaaagactaaacagtaccacaaccactgacttgtcagaataaatataaaaaaaaataaaaaaaaataaagatagaaggaaccttgttaaagaaaatatcatcaaggacaatagtagcaatgaggatttaaataatttcactcggttatgatatgattactttttcatgtaaagaatttagataatatcaacatactaacactttgttaaattcatcataaaatgaatgcaaaggctagagaacattttaccaagtgatatacaagctccagctattatattaacataggcctgtataaaagcctcagtatccatatcatcaatatcattgtcatcacctccaatcccttctacagaacatctgacaatctcaggaatttgagaccaaacccaatcttttgagggatgaaccctacaaaaaaatatgcagcaagaatggatcagaagggtgacaaacagatccaagtagattgttgcaataacttaaagaaaccagtacaaacctgttccacattattaaatttcgagcaatgactctaagcattataaagtcaggcctcacatattgcaaatcaaaacatgtattgggaattgagagcctagacacaatagcctcagattctgtctgtcaaaaaaataaagaccaaagttgtaaaaggtataaaacaaattaaattgcagtagataaacagacttcttgttgccattactactaaccttcataaacatcaaagcaatggcaatgatggctccaggtgcagtgacatcaacattgactgttgtcccatccatcatctacaagtacaactgcttaaattagttatgcaaaagaaagtctcaactataatgtctcatacgattttatttctcttttatttcatcacggaaaaaatacgaattgaattctctaaacctgtgcagaaccacgacattcatccattgagactgtcgaaaaatgagatctttcctgatgcaaaagtacttgagcattatataaaattataaacaatatcaacaaggaaggaaagaaatgacagaagaatgtgaaccccattacattgtgtactttgtcaccaacgtagagaaacagacgattcacaaatgtgtcaatgaaaccaagtgcatcttctccccgtccttcaggtaacatattttggttagacaaagaaccacaaaaccaaaatccaaaacctattatttaagtattcctacccaatgcaacaagacccagtgcaaatcctgcagaaacagcatgaccctctcgctcaagaacattatcacctccacttcggcacccaatttcaccctgaaaaaattacatatagatgtaggggaagaccagttaaaggaagaaattaaattaaacagaaacacagagacaaacaatttagtaaatatggaaatcctgcaaaccctaatcaaccagggaacacataggtattattatttagaatgaaaaggcatcatgcaaaacaaaaaagaatcatgaaagaaatttatgaactggtactatggctggtttgttcaaaatacagaccataggatctgtacatacctgacagatactatcatgcaagcaaacaactttgataaaccaattcctaaacacgcaagtgcacaaatgataatgaattacaaatatatcaaaactccaagctaattgcatttaatggaagcggaaagaggaaacaatattgtaaatcataccaactggttaaatggtccaagaaagcaatagaattcagcacaataaatagtaccagttcaaccataatcaaccttcatgttcgctttatctcgatggcatgcaagaattaaataactcgggcatatgttcaaccattggataaacagcagatgaagacatgaaatatatttaccaataaaacctgcattgtttgtgggtgagctgaaccttcatataaaatccccaaagacattaaagcggctgactgaaaaaatataaatttcttcatgagataaaatgaagcaagtgaaagccccagctttgggcttttataatttttcttctgatgttagaaagcaccagcaaaggagggagggggtgaaaagggctaatccaaagtgaacaaataaaataaacataaaagatacctggagcaaggttggaacctctaactctggataggaagatggatgtcgtacaggaatatgaaaataaagtgtctgcaagtgagtaattttatcaattctcccaacatagcaggcagaagggatgagataaggggtaagtatgcatgctatcaaagaagttatgcaatataaagatgctgatttcatgcattaaagggcacaaacaaataaaacacaatcttctataaataggttaatgttaaaccccaaaccaaggtcattaaatcactattcaaattgtgaattgaaaattgcattttttgagatctcacatcgagtagtgggatccgataaaccaaggccctaaatccaaattctaaaaatgatatcagaacctatccttaactcattatttgggtcacccatattttttagtctgtctattcctaagcatgagggggtgctgttattggatcacctgcatttgtctggcacataagtctgacaactcaggtgacaattccagccatgctttggttcactctctggtttgtatcataggagtggctgggtcatcaattcacaccattcaaattgtgaatcaaatgatttctataatactccccccnnnnnnnnnnnnnnnnnnnnnnnnnnnnnnnnnnnnnnnnnnnnnnnnnnnnnnnnnnnnnnnnnnnnnnnnnnnnnnnnnnnnnnnnnnnnnnnnnnnnnnnnnnnnnnnnnnnnnnnnnnnnnnnnnnnnnnnnnnnnnnnnnnnnnnnnnnnnnnnnnnnnnnnnnnnnnnnnnnnnnnnnnnnnnnnnnnnnnnnnnnnnnnnnnnnnnnnnnnnnnnnnnnnnnnnnnnnnnnnnnnnnnnnnnnnnnnnnnnnnnnnnnnnnnnnnnnnnnnnnnnnnnnnnnnnnnnnnnnnnnnnnnnnnnnnnnnnnnnnnnnnnnnnnnnnnnnnnnnnnnnnnnnnnnnnnnnnnnnnnnnnnnnnnnnnnnnnnnnnnnnnnnnnnnnnnnnnnnnnnnnnnnnnnnnnnnnnnnnnnnnnnnnnnnnnnnnnnnnnnnnnnnnnnnnnnnnnnnnnnnnnnnnnnnnnnnnnnnnnnnnnnnnnnnnnnnnnnnnnnnnnnnnnnnnnnnnnnnnnnnnnnnnnnnnnnnnnnnnnnnnnnnnnnnnnnnnnnnnnnnnnnnnnnnnnnnnnnnnnnnnnnnnnnnnnnnnnnnnnnnnnnnnnnnnnnnnnnnnnnnnnnnnnnnnnnnnnnnnnnnnnnnnnnnnnnnnnnnnnnnnnnnnnnnnnnnnnnnnnnnnnnnnnnnnnnnnnnnnnnnnnnnnnnnnnnnnnnnnnnnnnnnnnnnnnnnnnnnnnnnnnnnnnnnnnnnnnnnnnnnnnnnnnnnnnnnnnnnnnnnnnnnnnnnnnnnnnnnnnnnnnnnnnnnnnnnnnnnnnnnnnnnnnnnnnnnnnnnnnnnnnnnnnnnnnnnnnnnnnnnnnnnnnnnnnnnnnnnnnccccccccccccccaaaaaaaacacagaacctattattctgtttccttgttttggataaaagaagaaatttataaagacagagatcatgtttgcaaaaattaacagtatacattgtaagggagggagggagttaaatctaaattgttagcctagaacaattagaaaagaaaccaactcaatccaattacacccgtcatttgattcctaaagccaatcccagtaacagaaccacagccttgaattcaattaattttaagaaagttgatagtcactcatcaacaaattagttctaagtaaaataatacaattaagaaggcttattattttatttcaccacgctcaaattaaaatattatcatttcctcgtgctcatggaaaacaattgaactaggcacatcccagatttaattttcatggaaaccatgacaagaatgagtgttttctattatactccagtttgagatgcctccgatttagttccattagattaaattaagtgtttttgcaataaaagggcaattgccttcatgatcaagaaaaagcaatgcaatcataagatattttctattgcacttcaactatgatctagtatctgagggcagagatctgcaacaatttcaccagaaaaattgtgcttgataatacctttgatatagctggatgcatggtgcctccataagaagctgcaaggccaagcattaatcccacagtagtactttcatgctcctaaacatatgtagggaaaataatttgatgtcataaaaaatggaaaagctgaaagataacaatataacataaaaaggaaagatagacaaattgtccccaagttaattgaaattaaatgaattatatggcatcaaccattttgtggtgacaatcgggcccttaaaaccaaacagtttattgattataccatttgagaattcacgttccaacttaagttttagttcatttaacttcattctgactccaatgagatatttgagtttaaaaaaaaacagagaactctacaatcaacactgtgtctattttccttcagtgactataattgtctacttgcaccttaccaacttaagattaattgtttctgttttgtaacaataaatcatcaacattagaataaatgaagtgctaggggagcattagggaattaaacctgagaaaaatactggtagatgtcagtaacagctaatacacgcagatatccatgcaatcctagtgcaagtagaagtccagcatgaacagaatttggttcctcaggtttgttatacaaaatccatgttcttgacattcttccctgcaaaaggaattatatgcaattttcataaatatgcaaccatacaattatgcaagccacaataacaaatactcaaacccaaagcttgttcagtaacaacatagttgagagtgaaatattgctttaaaacaatacgatgcctcttgagtttttggtatgcgtctctaatttctgacagactccattaatggtctgcttgttttgctaaaagaaagggacaggagagccccaaaaaagtactttgttaatttttaaaatagtcccagatctggacaaaaagaagcccaagggtcaatataaaacactgaaattttgttaccactaaacaacaacaaagatttatcccactagatgaggtcagctacatggatgatggatcaaacaactcgacataattaaaaaccaaagtttcaggttgcacaacacaaaaagtgaaaaaggacaattaccccttcccattgtgtgtgtctgggagttgggttttggaggtaaagggaagggtaggcagggcaaatttttcatttcacaattctaataaatattttctaatttgataatttaaaaaaatgataaattatcataaactagacgtcataatctttttttataattattacacaggtctcttaatttaaaaaataaaaataaaaaattgtcctcctttcctttccctccaaaaccccactcccaaacaaactcttgtttcctaattctattgtgaggaaaacaatgccaacataaaaggtattatagtcttatcttatgatctcaccaaacagctcctataccaataatatactatgactcaacaacttgtaatgtgctgttttgtttgtttgtctctccatagtccatacacatcaaataccgaaaatactttaacctaagtggagggcaaggggcaaaatcctcaccctatgagcttgctattggagttgagttaggcccaaactcaaatcctaaaaggacttaacctttctacacttatatacatctttgcttgtctatatttttttgatgtgggactatatagttctccaatgaaatagaccacggaagaatagaagagaaatattatttccttcgacaagtatggactgattgagcctccgaaccaaaaaaatcaacatgtgtctatcaatttcatattaaaatatttgttcaatttaaaattttaaaaatttacactctttccacatttaccctttcgtacacgatccagactgttacacgcacgacctggcaaagaatgtgactactcgtcaaaacacgttaagaaggtagaaggcgacgagggccttcaggatgttcttgcagaggtttgtttgccacctttgacacggatgagcatgttgccgtcgctgaagcagtgatcgtcgaggaggaggatgggctcgaagcggataggggcgttcacgggtatgcgaacccgaattgacccaaaccgatccgaacagtttaggttgagttatttatgtatttggaccaaaaccaaaccaatcaatcaaaaccgttcctatacaggttgaatcatgggcttagatttatagatccgatcaaaaccaaattgaaccgatcaaaatcgataaaaaaaatttagaattgtttggtttgactttaaatactgctaatattgggactctaagtgttggaactgcaagtgttgtgactactagtattggaacttcttaaggtattactttcaggtacattgttatttgttttacctttttttcatatttattttttctgacatgtttataatattaatgaatcatattttgttcatttgtttcagcaaatctggttgtagcaaatctgattgcaacaaagcttattataagaaattaatttgtagaaaatagttgtgatatagactattatattaaatctcgttgaaaaatattttgttttaatttgtattagtctattttaaaatattatgttaatggtattaaataaatcaattttactactttcaaatatttgataatattgtgttaataatattggatatttggatgaatcatgatataaaatagtagttctaagaaaaaaatatcaaatttaaataggtaactcgttcgctcaaaccgaaccaaaccgttcatgaatgaattaggttgggttaggtttcaaaaaaaaaattgtgaaaatctaattgaaccaaaccgatcaaatttgattgggtttggtcctgaatttgaccaaaaccggcccgaaccagcccatgaacacccccttcgaagtggaggatatttggttccacaaatggaaggccatatctggttttgctcgcggcatgctaaaaaaggcaatatgatggaaccagttttataacaaattctatatgcgacgatttacaggtcaatcagacacagcaacatagtttctgtttgtagaaattcaaaagagaatggtcctgcgctggtttgggaaattgttggtctattgtatatttttttttttttttatcagcaaaagataatatatatatatatatatatatatatgaaagcagtacaagaggtactgctgtgattacaaaaaattgaaatctacacagaactttgatggctttatctcaaagccaacaaaggtctgacaagatctctcatgaatannnnnnnnnnnnnnnnnnnnnnnnnnnnnnnnnnnnnnnnnnnnnnnnnnnnnnnnnnnnnnnnnnnnnnnnnnnnnnnnnnnnnnnnnnnnnnnnnnnnnnnnnnnnnnnnnnnnnnnnnnnnnnnnnnnnnnnnnnnnnnnnnnnnnnnnnnnnnnnnnnnnnnnnnnnnnnnnnnnnnnnnnnnnnnnnnnnnnnnnnnnnnnnnnnnnnnnnnnnnnnnnnnnnnnnnnnnnnnnnnnnnnnnnnnnnnnnnnnnnnnnnnnnnnnnnnnnnnnnnnnnnnnnnnnnnnnnnnnnnnnnnnnnnnnnnnnnnnnnnnnnnnnnnnnnnnnnnnnnnnnnnnnnnnnnnnnnnnnnnnnnnnnnnnnnnnnnnnnnnnnnnnnnnnnnnnnnnnnnnnnnnnnnnnnnnnnnnnnnnnnnnnnnnnnnnnnnnnnnnnnnnnnnnnnnnnnnnnnnnnnnnnnnnnnnnnnnnnnnnnnnnnnnnnnnnnnnnnnnnnnnnnnnnnnnnnnnnnnnnnnnnnnnnnnnnnnnnnnnnnnnnnnnnnnnnnnnnnnnnnnnnnnnnnnnnnnnnnnnnnnnnnnnnnnnnnnnnnnnnnnnnnnnnnnnnnnnnnnnaaaaaaaaaaaaaaacccttcccagctatgcaaaacactctcgcatattggacgaccaataatggaaaggagtatcaaaatccttctctagattcctcagccaagaccagcaaaagaaaatggcatcttctaagagtttgtgaccattaaacgtttcattatggaagaggatttgatttctatgattccaagtacaccacgttagtgcagcccaccaagatagccacctgtccaaagctttcccacgtagatgacagaaagaggattggttgaaatgctcctttggatcacaggagtaaacccccaaaaggtttgcccatgcccaggactcccaccacaaaggtaggattctagggcagctgaagaagagatgggaggcatcctcctggtgattattacaaaaaggacattgaatgtctgttatggctacatttcttctcctaaggttgtgtcttgtaggtagtctatctttaaataacctccatataaaacatgctactttggttggtattttcagcttccaaagaaatttgtaaacttcctcctgtgtgtatctgccctcctcattactaagcatgtggtatgcactattcactgagtagtttccattagattgtgctgtccatacccaggaatctgctaactgttgattaattggcaccccctgtatgtcttccaaaagtgatataacctgctgaatctcatgctccctaaaaggtcttctccattgtaaattccaatcccagccatgctggttctgacagcccatattctgcataaattgttgttgctgttgtgaaatctgaaaaagtctgggatatgtatccttcaatgaagtccgatctatcttccactggtcttcccagaacagtaccttgctaccacatccaatcttccacctcaggccactaaaaaaccatccatcaagctgtactgatccataagccaaagctaaatctttccaccatatcgaggctgatggtagtgtcgaggaagtctgtatattcctccagcctccgtatttagattccaagatttgagcccataaagcatccggctggtgaaataggttccagcaccatttgcctagcaaagcctgattaaaaacctttaaattcttgatgcccaaccccccattctcctttgagagacacactacttcccagttgacccatggaattttcttctgttcttgattagtgccccacaaaaacctcctctgcatcctttccagcttagttatcacttgccttggcaccctgaaaaaagaaaagaagaaaataggaattgaggtaaggacagccctaatgagggttacccttcccccaaaggataggtatttgtgtttccaagtggctaattttcgctcacactttttgatgataggaccccatgttgccccacaccttggatttgccccaataggaagacctaaatagggaaaaggtacagacattatgccacaattaaggaggctagccgcagtaaatatccattgatcatccatcccaaacacagcgatgttacttttattacagtttaacttcaaccccgacaccatttcaaagctcatcagcagcacctttagagctttcacatttgctatagttgcctttccaaagaaaatggtgtcatctgcatattgcagaatgctgacatcagattctttattccccaccttgaaaccttcatacagattttttgcttgtgcctcccttaacatccctgttagcccttctgctgcaatattaaacaaaaaaggggccaatgggtcaccttgtctaagccccctctgaggttgaaattctgatgttggacttccattaaccaatatggatatagaggctgatgataagcaccccttaatccaggatgtccatttctcgcaaaaacccattctcttcatcatatacaagagaaaatcccagcttactgagtcatatgctctctgaaagtctgccttaaaaatcacacagctttttctactcctcttagcttcttcaacagcctcatttgcaatgataacactgtgcagtaattgtctcccctcaatgaagccagattgtctttcatcaatgataaaaggcatcacctttttcagcctgttagcaagcaccttggccactattttatagatacagcctataagagagattggcctgtagtcatataagctttggggatccaacttcttaggaatcaaggctatgaatgatgcatttgatccttttggaaatgtcccatttgcgtgaaattcatccaggaagcggagaaaatctggcttcaatatatcccaaaaagcctttatgaaattaaaattaaagccatccggtccagagcttttatcgctgccacagctccacactgcctcttttatctctgatgccccaaagggagctgtcaaaacactgttttgttgaggatccaaagttttgagctgaatcccatctagtttgggtctgtcaaaatccgattcttggtagctgtctttgaagaattttgttacctcctccttaacccttcccggctcttgaacccaacttccattaattaatactccttgtagcatattcttcctgcgtttccagtttgcagacacatggaaaaagcgtgaattacagtctccctccttgatccatttcgcccgcgccttctgcgttagtagagatgcattggcagttgctgcctcccagagttcctcctgaatttgttttcgcttctttatttcttcttcagacatttgcctatcttctgcttggatttccatggtgtttagttccttctctaagtctgtaatcttctgttgaatattgccaaactgttctttgttccagatcttcaacctctgtttcagtagtttaagcttctcttttaatatgaagcctccccagccaggtttcctatacgagctgcacacatcagctatgatttttgagatggatttgtcctgtaaccaacagttaaggaacctaaaaggctttggtccccaatcagcctgtgcagattttaacacaatagggcagtggtctgagaaattgcgatccagggctgtttgataacacccctgccatagagacgtccactcagcagatatgaatgccctatccaatctgcttttggctgagccgttcggtctataccatgtaaattttcttcctagtctggatgcctcctccacatctaaatcagcaatccaatcattgaagtcttttatgctgcttccatattgataattctgccccaaacccagcctttctgatggtcttctaatatggttaaagtcaccaatcatgcaccataagtcagcagcatatgttctccttatcaatttgatctcttcccacagagattttttcaatgttgcatcacaaggtgagtacacatttataattgtaaccttcttattttcagtcaagcaaaccccttccagataaatgtagccattgcctttcaaccttttttctaccttaaaggtctcttcactccatacacatagcagccctcctgctttattaattgctggctggaattcccacataacatttgaatctccccacaaggcttggcaagtaatctttgtaactatttctttcttggtttcttgtaaacataacaaatcaacttgttctttgctcaccaatttccttattgaactccatttgacccccctccccagaccccttatattgtatgatataatcttcataatttcacctcctctcctccccttcttgaagtctcccccttttctgctgcctccatacccagaaatcgattaataatatcctccttataatggctggttaccccgaattgttgggccatattccagaactcctcctgtttgggagatgaaaagctggatattgtttctgtgtctgagtttgcaatttactttaatcccacctcaccttcatcctctttactcccactatcccccccaggctttgtgggagatttatgtctggatagcacggttatgtgctcattcccttttgtaccacttactgcttgctccattttcccaattgtgcccatcttttgtccggaattattttccactgctaagttggtttggcttacgtgtatcagctgaggcctatttttccctcccttattccttgaatacacttgccattgaggcccaatacctatgtggcccatcagacttttattaccttcactatttgttttttcacatatctcaataggtccctcagctgccttctgtacctttctgaagttggccccatcattatcgttcttttctagtgggtccctccttaccccagagtttccttctttggtgacaatctgttgtactgcagaaggggtagtacaactggccaagtctgcaccatgcttgtttccgtctggtctctctagccttggacttgtagcctgagcccctatgcagtctacatcaaaagcctggtttttaggtggcgtctggtcctcaagggagtccgacacgacctctttctctgacctgctgctagtaccacttttttgaattgaagcacggtccgcaatgagttgccccggtccatcgtacaaggaccgttggatattctggtctccaccgtcacttccatgggttttttccaacaccacctccgtcgtgcctttctgcgagcagtagttgtcctccacctcttcactctcaccctccaagctgtctactgatgtgatttcatcagaagcttccgcctggcatcgatttagacacccacatctgaccgagttcgcatttgtctcttctgtgacgaagattggaaaatcgattccgttaatggtggccacaatgttgtgtttgatgatgggtgtccatggcgttttgattaacacacgcgccctgtccaggcgttgcagatcttctgtgtcatcatccacttcgaccaagtccccaatggttgccactattttagccaggttggtgaggtcccacgcgtgaaggggtatgccccagcaaaggacccataccagtcgataagctggcttcaatgatggcttccatttctccagagaatggaaggcagataatcctagcacctcttcaccccgacagaaagcctgagctttaggatcattcaggcccaataacaacaccatgtcttccccaaagtatctcggcctgatatcttcttctccgtcccaccccatttcgtcttgcagcttgtcgaacaggtttaacttgctcagccttcctacccaggcgtcctgtacccattttttgtcttgtatctgaacctctagctgtattgtagaggatgttgatttggtaatgtccgctacatgcttcggatacctccaatttttaagattatgtttgggtttggctacaacctgagcgtatgatggttgctggtagggttgtctatgattgggttgaaaatatctggagctggtttctgtcctcgcttcaaaggcgccttggtgttggtttgcttgtgctactgctttcccttttgcagcagcgatgcggccttctctttcatgctttggaatgttagcatgtagcttgagccctcctattattagattgtccaaagctctttctaagttcagaatgttctttacacctttgaaccttacaaacccataccttctgcctcctctatttctgttttttgctataaaaacttccctaacatcaccccattttttgaaaatggaccacagctctgcctccccaatgtcctccggaaaacgtgtgaagtagaaggaggatacatcctcgcgttctctccaattgatcgatcttctagctccaccgtgtgtcgtcgcctgagccgcagcatgctgtctgtacctatccccgtcgaacctataactatgtgaaaatctctctctacccaccccagagtgtctctctctagctctctctctcatctcaaagtttacatacacactggtctattgtatatttgaaggacttgttaaattacgcatttagttttgctctttttggtgggtgagcaatctgtttttgtactaggatttctggtagctatctgcataaacacttcctttttgggtgttctatgcgtagacacttatactttggatgttcatgtacatcgtgagtgggggtgccgcttcactgcttgtgatttggtaccttttacactttttaatatattttatttggcctttagaaaaataaagttcaaaagagaattgaattatgttactaaaattgtaaatgcaactgaaaagggcattagtgttttcaattggctacattatagtagattttggtagtgatgggtggaatttatctatacattgtattgtacagcaaatggtcttcactatgcatgaacattaatacaaatattatttgatgaattataagttaatgttaaaaaaataatttaatattaaaaaataatttaaatattttcatttaaatttaagtctttttaaataaaaaatttatcattaatacaaaaaatataaaatatattaaataaaataatatagtcaaaattaaatatactaaaaacattaaataaaatcatataaaaattaaaaaaaatatattaaaaataatattaaaaatatatannnnnnnnnnnnnnnnnnnnnnnnnnnnnnnnnnnnnnnnnnnnnnnnnnnnnnnnnnnnnnnnnnnnnnnnnnnnnnnnnnnnnnnnnnnnnnnnnnnnnnnnnnnnnnnnnnnnnnnnnnnnnnnnnnnnnnnnnnnnnnnnnnnnnnnnnnnnnnnnnnnnnnnnnnnnnnnnnnnnnnnnnnnnnnnnnnnnnnnnnnnnnnnnnnnnnnnnnnnnnnnnnnnnnnnnnnnnnnnnnnnnnnnnnnnnnnnnnnnnnnnnnnnnnnnnnnnnnnnnnnnnnnnnnnnnnnnnnnnnnnnnnnnnnnnnnnnnnnnnnnnnnnnnnnnnnnnnnnnnnnnnnnnnnnnnnnnnnnnnnnnnnnnnnnnnnnnnnnnnnnnnnnnnnnnnnnnnnnnnnnnnnnnnnnnnnnnnnnnnnnnnnnnnnnnnnnnnnnnnnnnnnnnnnnnnnnnnnnnnnnnnnnnnnnnnnnnnnnnnnnnnnnnnnnnnnnnnnnnnnnnnnnnnnnnnnnnnnnnnnnnnnnnnnnnnnnnnnnnnnnnnnnnnnnnnnnnnnnnnnnnnnnnnnnnnnnnnnnnnnnnnnnnnnnnnnnnnnnnnnnnnnnnnnnnnnnnnnnnnnnnnnnnnnnnnnnnnnnnnnnnnnnnnnnnnnnnnnnnnnnnnnaaaaactttttaatttaaagccgtatgttaaaaataacatgacttcagtttaaaaaatttaaaaatatatgttacgacttcaaagtcagaaattgtaataactattctgacttatcccttattctgacttatccctttttgattaataatttaaaatatacctccaaacgataataaacaaaaaaaaaaaaaataccccttaatattaaatcttctgttcttcggttctattccaagcataatacactgcatttgtttttttagaaccgaagaacagaagatttaatagaaccgaagatttggtggacagccctcacttggtccacttggcgtcatagaaacagaattatttttcataatgacagcttcaatcatagcagattgatggatgatgcacttttcacgtgctggacatggcttaagagtttggagaaaggatttgacaaaccctttcacttttggtctagcaatttgagggaggcttttgtaattaggggaggggtctctttttaattttctccctgttttggggttgacctacaccctttacagttttatggcttgttaattcattctcttcatgtattaggaagccataggcttgtcttgggtttagatattttgtaatgatacttttggtatcttaccttttattatatatatacacatatttatctttgctgatcaaaaaaaaaaaatatcattttcgaatattttttttccttgttctttagttaacatgttactcttcactcctcacataattagtaggcataatggcactaaaggcatagactattaccattgcgaaacaaaatggaaaccatgctttgctgagggaactttgctgcattgtgcgtatttcttgtgctattaacatgtatcccaagagaaagtgctcaagatagctcttgcctaaacaagctttctactgcctgaactacctcaacggcattgaagacccacctaatagttgctgtgagccacttaaatctgtgattgtatcagcactacaattttaaaaaatgcaattgcagtagccagaagagagattcgggtttggagcagactctgaacccacctttgacttcttggttaagcctcaccgccttctttggcttcccttgtttctacatttcatctgagctttgacaaataccatcgagcttagcatcaaccacaaactgcataaggttgtatttgccgaccaccagccttggtgcctcaggttcgggaagttgagtctgggaaattcgccttgccgaagatgctttgttggtaatcattatcagcatgcgtgtctacgtcaagggccccacacctcttagatctgttgtacgtgtgtgcaaaagtctggggcaaactagggtgtgatcacgtgaggaagggtaattctggaaagaacttacattttaaatgttaaaggaatatttgatagtaaaattaaagacaggtgtcaatttttttttgtgccagaatatcttccggctggtttctggcggaggatatagcatttctcatagaagaatactcaagtaacccatataaggtcaacaacatgaaaaaggtcttcttccgcttttcaagttcttggtatggggtgtaagccgatgttgttaaatcgtagagtctaggtagactcagtgggatgagctaaatcgtaaaatcatagaaacgtaaatcgtacataagaatttacttcatataaaaaaataaaaataaactgaaaatctaacattaaaacacaccaataaactgaatatcccattatttttggacaaaacttgcatttcatttttttagttcctggaatttcaacaacatacttccaaccaggatctgttctatttccaggagcaacacagaatcctcaggaagcaatcacaacacagaaccctcaacaattcgacagtctcaatctcaatacacaacacagtagcaatcacaaacacaaacagtcaaacacactagcaaacgcacaaagggagggaccgagggagaagagaagacgaaacagagagggaccaagggagaagtcaagaagcaactagcaaacacacacagggagggaccgagggagaagaccggagatggaaaacttacctttgggcgcaggcacgagagggagaagaccggagatggagaagactggagatggagcgcgacgagagggagaagacctgagagcgccgagacgtaggtaccatagaagagaatgggttttgaaaaacctattttttttttttttttaaatacacactgagtcaactcagcgattcaaccgagtttaccgagtctatacacatatccgattcactaccgagttgactcggacgagtttaccgagtcaactcaacgatttaacaacattggtgtcagcaaggggcataagctcattgaagtcgtgacgagaaattgtcattgcctaattaccataattaaggatatctagcaatatccaacaattgcctaattactataatcaaatatatctacaatatctaatagtcattttaggggagttaggagtgtccttgttagatctcaagataaattggcaagttgtgttgcatgtttcttaatgtttttatttattttaggttgtataatctttaaaccttaaaagattttttttttttttagttttttataatctttaaaccttgaagatttcttatcctcttttgtatctgcctttcctatcttaaaaaatttctttcttatcaaaaaaaatatatataatttcctagcagaaacaagtttaaaccattcaaaactatgtaaacctggagaggggctagtctaagtccagcagcaacagcattatgaaactcaggccacgacctgagttcttgtatgttcctgatgtttggatcaagattaacctgtgaataaacaaacatgactcaagtcaacaaatacaaaaactagtaaatagtttcacaagccaaaacaggcattacagatataatcaataatatgatatctacttacagtagcattctgttgggctggcaaccgacctgctaatataagctttggaacggtaaaagcctaaaaattgtgacaatttcaatcagaaagagtatatttccaaaggtaatttcaaaattcttagtgaaggcaagtaggaatataaaaagttaaacgtaaagagcacctcagttaagagtgtatatatggttgcaagggtaaatgccccacgtccaacaggaagtgaagtggtcctttgtgcaaggtgccacagttgagccttcataaaaaataaaataaatgtatcaaaggcagatttatatatatatattttaaaaaagtatacccgttcaacttgagaaatactccctccgaccctgtttataagacataatcaacaaaaaaaaattgtcccttattacaagattttatttcatctatctatcttgtgcattaattgttcttttactaaaatactcttatttattttattataaaaaatgctattttgaattgtcactttctccctcctatgaagattggagaaaatgaataggttcccattaatgttgagggaaaatttgaaaattattacaattagagacaattttaatgttaatacctaaattaactatttttcttaataaacataatttagtcaattatgtcttataaataataagagaatataaattacaaacaggaagcaatgtgcagcagataattaaaacaaacttggccatctttttcaagaacagaatttgctaggagagaaaaaaaatactaaatgaaaaaacaaatacaaacatagaagaattaaaacatagcccacaattgggataattaccaactcaagaaagcctttccctgtataagtacaacaagacaatcgtgtacaatatgcaaattacaaatttcttaggtttctttagtttggtattgatttaatttagttgctgtaataattataaatgattactaacgtaaaaaaacaccaatttataacaatctagatttacttttttaataaaaaaaatcattcaaaagggagaaaaggtaaaaaaataaacattttcctttagttatatataccatactagttgaatcaaaaattttatttttaacattcataagtaattatttttacgttaccttaataattaaatcaaatagtgtcctaatataaaaaccataacttaacctcaatatgatgataataacaaaaatcaactaaacattaaaactcggaagaaatacaaacttatgacaaaataaacgaagaaatcaagggaacacacaaccacattatgtgaccaaagaaatgtatgaaaagcccaattatatgtaggatgctaaagtgtcccctgaaaaagaatgaattgcttccacaagtgtgtgatgaacatcttataatggggagatattttttacataaatcaggcatgttacacacaatgccaagaattccacttaaagttaatatgacagtgcaaaacagtagatctaatttccaagttacatgtatgtcatagtcaccaagttcggaatcattgcattgggtgtatataagaatttttacaaaaggagggtgacaggatcagacttgctaagaataacaccgttgagtatattatcagatgcttgaataatcaaattataaacaaaactgttgacaatcacaaataaaacaaataccatggcaacacatacctgctggaggtcctgatcagaagcactatggttaacagatgtttgaattgccacaggtcttgaagagcacaaaaggcgtctaacctagtaaaagtagccagagccatgattcagataagaaagaaataagtttttaagtcacttttgcaccagcacataatatacatcaatttccagtggactagtaaaacgtctcaagatatcagtatagattttttttttatcagcaaaagatattatattaatagagaaaataataacagtaaaagtagtactgctatgattacatcctagcatgaacagtatcagaacagaggtggcttaatgcctagtgaagcatgagaaagacacctaagttctgactttatagtttatactaggtcctaagcctccccaaaaataatagaaatgtacagattaaaccctcccccaggaaccaaaacattccctcatattactagaccagtagtgaaaaggggagtcaaatcctaattccaaatttctgagccacgaccaacagaaaaatatagtgtcctccatctacttctgaccgttaaaagcttcattgtgaaaagtatagataaaatacatgtactgatagactgtagagaatgatcctttaagaattctccattgaggcatagtaacattgcaggttcagaaatgtcccatcaagtaaggaaaaacagtataaaaaatttcagatttctaagactataaagcagttgatgttatatgcataaaagcttgtcattaacaagtaccatataggactcttctctcctatcaatttttgttgttgaaaacaggtggaaaaaaaatcctctggactcactagtagctgttaaaatagaagattgtggatgcgtgtttatataggttaattacattaattatataaaattagagaatactatgtttcctctaaatcaaagattatgtgcctataaaccgctattatcaaatacattgatgggcaaaaaccataacctttttatatgatctatagacaagcagcaacagggattgaaaatatatatcaaggaaagataatcaaatcagtcttgttccaaagttcttaagtgaagtgccataactgacctcattcaacctaagatcacgaccataacgcaactgtgtgctagagttgaatatatgctccataccatcagtcatagacccatcaacggaatctgtatcctcaaactttgttccttccaatccaattgcatcagaaatagtagaagatattgtcactggatgcagatttaacatataaggagtggacattgatataacattcacattggttggtgtttcaatgcccctatatttgcattcacgtgccaaagttgacattgccaaatcttgtctgccaagaagtacataagcagcagctggccagtcattgggaggtgaatctcgacacttatctaatgcctagaaggcataacagaaaatagatgtaaaaaactctggaaatatatgttaaaacttaaaacttgctagagataatgctcaaagaagaactattatagtaatagtagtaagcaaaacacgtggaaaatagggtagaacattgtcccaggaatgtgaaaaattcaaacaaatataagaaaaacagtaggcaatgcctgataaatgagagtgccatcaagatgaacattagaattatgtaagatgacaggtaatttcaaatgttgaacatgctcctgaacaaattaatttgtaaatgatttaaaaaagttctcaaagccctgacagactgacatcaatgaagacaaacttacatgacgtagtggaagagatacaccagaaggtagtgagtccagctgttgaagtccaaatctttcatcaaccattgctaaaatagtaagctcctcctttgaagaatgtgatcccatagtaacgttacagtaaacaccagtagacagtttctttcccagtaatttggcaccagataatatgctataaaagcaaactactttccgggctatgctaaccacagaacttccttctttacagactaaagctggaagatcattaatattagcataattagatccatattgcaagcaattttcaaaccatctgaataaacttggacaaattttaggtgaaatggtgattccagacttcagaaactttttacagaggccagggaaatcacgaatataatggtccaagtagatgtcctcagccagaaattcagcaattttgcataacagaattgaaagaagctccaagtccctatagatcataggcaacaattatcatatagaatcaataaatatattttaagaaaagactaaaagtgggaaattaactacttggtaaaatacagcctaaagaacacaatgaaatgcttaaagcagatggtgttaacaatgtatggaattatggataaccaaaagacaatcaaattaaccttttagctgtcaataatcagaacacaaagcaaaagtttttcttgatcttatgatatagccttagcttggtaagtctggtggcatcctcacaaagctaaaatctaaggccctgttcgggatggttgccagtttgtggtttatggttttaaaatactattttaaaaccaaaacgtgttcggtaaaattggggctgacttggttttttaattgttttcaaaacagttttacccttgtttgtaaaacaataaaaattggtttctggagttttgttgtgagtttaccctaaatctcagtcccccttacgctgctatctctctctcttgacagcctctctctcgacgcggccctctctctcgatgactcgctctctcgacatggctttgtctctcgtttactctccctctccctggtggtcaccactcgccgccggttgcctctagtcgccgtagatcaaactttgtcacttgtagacaatgaagggagtgcggaggagacaaagaggttgcgtcgaagccaaaggagaaggcttgttggttggtctgcatgccgatgctagctagcgcagtgtctgcgtctatgattgcgacaccatctgtgcacgacagcaacacaagatctgcatctcaagttttgcgatagagaggtgatggatattcatagatccaagttgtttcatcaaatttgggtgttttggaaacctaccttcttttttctctcatccttcaagcaatttcatcacttctctgataatcattgtttgggatggatgaaaacctttatgatggatgagttatatggtttggtgcaattgttatctatacctacgtggtttgggggttattggctggaatttctttattgttgcagtggacatttccttttctgttagtttaagttgattatagatgttgtattttaattgaaatggagataataagaatttgtaactggatatgaagttcgaaatggaaaagtttcccttgttcattgattggtgttcatacatgatatgatgttgtaacattgttaaattcctccctttttttatttgtatagtaaggttctgggggacaaatttttgtattcaataaggaatccatttgaaaggttctctatacagcataaatcaatgcctatgaaatgcgttaaatacaaattaaaaatgcctatgaactgtttaatagaatggctgagaatggattgaatatttttggaatgttgtattgcaattgaatttatttttcttgcaaatctaactagtactttgaatcagatttggtaattgaaatttgaaagccgtgtagtttgtgtttggatgtgataagaaggattcatagataatgtctttggaagaagacagatgaacagaaaactaaaactcaacactcaaaactgaaactgggtttagtttttaataatttcaaaattggaaacagaaaaccaccccgaacggggcctaaaagattttgcataacgtgatgaagtagaaaatgacagatggaagtctctgcaaaaacttcagcactaacttttttgcaggtctaagactaagactgctgactgatgtatgatctttacttctagcaatttcaaacttataatagcaatgggcagatcatgaaatgatgagagaacaaagaaagatacaggagagaaatttcttcttttttctgtaaatactgctgtacagcgagttatttctcctgattgtgttactgttgttctggtacctaacaaacttatttgattccttgacttttgttgttatggacttatgtgtttagcttaagactgtgactttcaattattaattattatgaacaaattatgaatatgtctatcattttatgtggaaaaaaaaaattgagcatttatatataagtataaattatttaacttatattgtttctatagatttcagtacagcagccatccagctataccgatgttcaagttggctgttctaccttacccttaaacatgtaaatccatttaaaaaaaaacagtgacagaataaaaaatgcaacaggagcagggcttatgcaaactatcctttgtactgtcactactgtgtgaccaatacataaagcaaaagaaagttggtatatcatcatgaaatgaaagagaagaatagatgtagctacttagcttaaaagttggcctcaagctaatcaaatcaagctgacatttaaaacattgaatttacaactaaaagtaatatagattactgaccagattcactaacccaaccaactagctgcttcctaaacaaactgggcagtattaccagacaaaatgccgaataggatagaaataagagatgatcagaaaatgcattagctaggatgctagatactaaaatgaaaaggcaacccaaaatatattacacaggattagagacataccttttgcggagattgtcaagtttcaagctttcatagagtccatgaagagattccagactttcccttaacagatcagtataaaatggcttgtcaaaactttgtgtgccatctacagatgacctttggaaatttaattcctgctgatcaagtgacactgcacaaggtattcggaacatggagtttactttgcaaaaattataatgaaattggctactaacaaggaagtcccatgcagaatgtggtactgaatcagaacgcttttgacatataatgttatattttccgcagatttgcataattacatgacaaaaagagtcccattctgaatcaacaatagattcagcttctgacagatgagctggatcaccatctttccagagaagaccaagaaaatgtctgtaataactagaacgaagcccctcagcaagtgctgcgatgcaatcattagctaatgttgatgaaggactttgtcgtaatgcacatctaaagatctgcatatggaaagcagagatttcaaatgaagcaaagaaacggattattaggtttccatttgccaagaaacctacatatgtcaacttcaaggtaaaaaatgaaaagaaatcatccctaaatacaagtcaacatacctgtctattatttactatcacattgactcgcccctcaacagcatcagccaggcctgtaatctttaagtaattgggaagaggagattcttctgaaagctccaaatcatgcaaactcttatctttatttaagcaagaaggaagcacatatttgcacaggcattgcttcccagactacaatataagcatggcatattactaaaagaaatatcaaactttagcaatcttgatggcacttgatggaagcatgaaaaagggtgagtctgagaaagactgataactttgtataaagtataaaaagtcaatatgaaaaagaatttctacaaattaaagctgccaagtttacagctccatttataagaaaccatatccaggcattatggtaacatataggtcaaattttataaggccagaacaagttatcagatgtagcaccagtacttatcagggaataaaaaagtatctgtcagtagacattaataacctacctacaatatcagttatataccaatcaatgaaactaaacttacaatagtactaagagaggtagtacccaaaatttagcattaaaaaataaaataaatgtcacttcaattattcaaaagtaaaatcagattacagaaagaaagcaatttttatatggacacattaattgaaaaaatataaaaacaaagcaggagaatcaggaaccctactaagccctaacagcaacaaaaaaatgatgcaaccatcagctcaaaagaggtctcaaatccactctatgcaaattgcaaagaaacctttattgtaaaaaatcaagcattaacccacacggaagctaggaaaagaataataatcaaaacacaatataatgacaaacaaatgtagagataggatagtatatagactaagagaaatgccaggagccagagtcaggacactaaaaagattgaagaatgacacaatcaatttgtgtccatccatgtgtaagacttacatagagaagcagaacattttctggagccaaaaccattatgtctgaatatggaagtagtcctactttgaccctggaaaacacatatttgaagaaaattatgtccatcattataaaatcaatgtacagatagatgggatatgtaccttgggcgggttaccgtcacaggtgcagctgcaattgcagataagttccagctcatatcaggtttgacatcaaacacaatctcattatttatttcaacaatctgaagaccaacagacagcaactttctttgttcttggtgaaaaaagcagacaacaggagctgtatcatcatcagtggccataaagacctagtagtcatttgaaggaaaagtcaaaagaaaagaaataaaattgaatgtataaactaaatgataaaccatccaaggaggaaaggagaatgcaatccatccatccagctatctaattaaggacttgcaatttcactgttcggtgtaaaatctaaaagaatctggagagatttagagaatgatctaaactgtatttcatttcatcaatcgatttgattacaagatatgtatttacagagtacaaatatagagcactagcactaactgactaacagctgttgtaagtaactcaacaggtgacatagctaactgagaggtaactctaagctacccgtaggtctatactacatacactataacctatacggaatatacactatcattctgaactaaaaatctgaaactccaatgaataaaataattcttcaaacaacaaaacagtgaggcattttggttaatgtagttaaacaaacatcattaatagtgtgtttgaactagccagttagcttttttatgttcaaatatcttacaaccaaaatcttaccagtgttgttaaaacattttctagtttgttcttgatgattgatatatgtcattattctattttatctatagtctataaaaaattacgtacttcattgcccagaggctcctcgctaggtgaaggtaaaggggaggaatattctacgcagtcttacccttgcatatgcaaataggttgtttccggatcgaatatatgaccaacaagtcaccaagacacaactttaccgctgtgccaggactcgtcctctattttatctatagtctatagtagtataaaaactattcagccattgccatgtgttgactggccagtgattttttttttttcttcccacttcacactctctctcctccttttactctcttttttctgtttttctttaattataaataaaaaccatgcaaagcacaaggcactccctagtttattatattctgcagttttttagtataaattttgtgtgtaaaatattttttattatagccaccatgcaagggcagggagtaccatcgcaacaaggtggtcctcttctataagcagattatgaaatcaaataaaatattattaaaaagcatttgaataattatttttcaagtactaaatatgttaaactaatgaaactttaaattaacaaagttttaattattaattagtcatctgctatgctagaaatacagataaaacagctttgaagccatataaagcatctacattctactctacatttacatatattaatattaatacttgaaaagcaaagtaagcaactatgtcattaactgatgaattgcacttcccttttaaaaccaaaaaatgcacatacaaataatagccagataattttgaagaagcctaatagcctatatcacaccttacaagcagctatctgagcacctttcccctgccatattttacggaaggacaaatgttttggcaatacactcatgggatctatatgtaataaactagtggccggatcctcatcaatgttagagctgacaatttctgcgacccacaaagagtgctgcatctttcctgaattcagagtaacactatcacaaaaattaccaagacaactaccaggaactgatagcaagaacttcaatgaaagaaacctttattataggatgccataagtgggacctgatcacttgtccaaattgtcttttcatcatattccttcatcatgttcaatttccctctttcttcaataaaagttggctacaataacagtaaaagtcagtaatcaaatggaaaaggtaaaccaaaaaaaaaaattatagcagtaaatatgtcacaactacacaaggataacctagaagtaagaaatttcagcaacaatctggagattgttaacatactcgaagttcatccagtggatccatcaaaatgagatgagaggataccaaagtaccctcccccttttggatatgatgagatgcactaagcagcatatcacgtgtattaagcaaagggcttgtagatgaaaaaggaacacgtgacggtatatttgcttcaacttcttgctggagtaataaaccaaaaggaagaggccatatagatgtaattgtatgaggaaatggaagtgatactacttcacctgttaaacagaaggaaatttcagtcactatatcaccaaaaaaaagaaaaattgaatacatgaaaatattgacaatctgaaatatagatataatgatatacaagggagatttaaattgatgacttcttctctagtcatgaatgaaaagtgtgtgtgtcgagttgagatttaaaaagatctttgaatcaaagatagaaaacgaacatgagacatgtagttaattaaattccctgctaaagcaaaaaatgatggaagagactgtgcagatatgatagagcaatgagacatatagttaattcaaatggaaaggaacatgagacatatttaattaaattggactgcagttgcaccatgactgaaaacaaatatacatagaaaaactaaaacaataatctaattcttggattttacataaatgatatgaaataattaggacatacttctgcttttttaaagtaatttatgtcatttttattttttggacttaggaatttatcttagtttgactaagttattagagggcgaccctggcacagccttggtgacctgttggtcataagttcaaatctggaaacagcctctttgcatatgcaaggataaagttgcatataatatccatcctcatacctttgcatagtgagaagcctcagggcggtatgctagttttttcttttttactaagttattaaatattaattgactaaattaaaaaattaatccctattcttgacaccattttctgttttgggtccatacatgaaaagtctgcattttaaatgtttgctgacttgactaatgtttgtcttaccttactggctactaaacattagccaactcagaaaacatctgacactgatatagctttggcaaatggtaaggaccaatatataaatgttttttcatgaaggaaccaaaacaaaaaatggtgtggagtatagacgccaaatttttaatttaacctaattaatttcaataagctagtgtttgactgggattccaaccaccttttgactatggataccatttaaggtgacctattttattcacactttgatatttattaactccgaccttgcgggaaaaggcatcgctgttgttgtactttttaaattattaattaaagaaattgtgaaattttactagaatcccaaggactcttggttattttggttctagttctacatcaataatgagtaaaagaaacctgtttccaatgagagtaaaatgaagttttttgacaacaaagccagaaactagtaccattctcatgacataagttctttttctccttttctatcatatgatggtggaacttcatttattacacttaccagatgtattatagatagtcaaacaatcattttgtaatatacatagaagagcttcatctgtatgaccaagacgacaccagcacacctaaaatttcgaaacaaaattggttaaagcagaactgttcagtaaatggaacaaaaagcagcattacatttacaacaatggaaaataaaaaacaaatttgagacttttagtcctccactgttgcaatttctcgttgcacgggaaatgttgcagccatcggttgattggataaatttccacctccttagtctttgaaaacccaaagctaagtcaaggaagaatgttttgaaggaagactttattatgaggaaataaggaaagaaatggaataatataaaataacctccttaaacaaatcacatgtcctctaaccactggctgcaaaggaacaaattttgtttctccttgtaaggaataaagaagattaaagtaaacattacaaaagtaaagaacaaatacattgaaacacgaagggagcactaaaccaataaatttctttctgaaacactatagaccattttctctacagactcaaaccattagctttggcttcactcaaaattaaaataacaaaaaaaaaaannnnnnnnnnnnnnnnnnnnnnnnnnnnnnnnnnnnnnnnnnnnnnnnnnnnnnnnnnnnnnnnnnnnnnnnnnnnnnnnnnnnnnnnnnnnnnnnnnnnnnnnnnnnnnnnnnnnnnnnnnnnnnnnnnnnnnnnnnnnnnnnnnnnnnnnnnnnnnnnnnnnnnnnnnnnnnnnnnnnnnnnnnnnnnnnnnnnnnnnnnnnnnnnnnnnnnnnnnnnnnnnnnnnnnnnnnnnnnnnnnnnnnnnnnnnnnnnnnnnnnnnnnnnnnnnnnnnnnnnnnnnnnnnnnnnnnnnnnnnnnnnnnnnnnnnnnnnnnnnnnnnnnnnnnnnnnnnnnnnnnnnnnnnnnnnnnnnnnnnnnnnnnnnnnnnnnnnnnnnnnnnnctccagacaggaaacaattcacacaaaaaaccgttctaaacgagatatccctccatcaacaatgatcaattcacttaacaaaaaatcgtagtacaggagttataaattactaatatagcgggttaaattaaacaaactcatttaattcaaattcaaagcatgaaaactcaaaactcaaaccttaacgatgtcagatgacaaggtaaatctcttaaatactctcgcacccgtcgaccatataatcctatcacaaaacatcacaacgttagataaaagcaatgcaacaacagtgcaacttcagacaaagtaataacaaagaggaacacaggcacagcagcaaaagaacaacacagaatttcaaaacgaaggttctaattcaacttcatttccgcacattcggaatcaactgaacagagaaccgagggttttattggcaaaagatgataaattaccgattgcctcggatgaacagctcgtgatccccacgattgctcggcgcagaagcgacgtcgtcgcaatcgtcatcggcgtctcggtctcgagcgatttcgggatcgaagaggaagtaatcgtacttgtcggtgacggtgtcggggggcttgccgtcgagagcttcggcaatgaggccaaatggcttgaactcgcccagcactgttaagcgacggattccgatggacattttctcggagctcagagcaagttcaagtttaagttcttctcgcgcttgagttcgctggtggtgacgagagtggaacagaagtactaagcttgagttcgcgcttaagatgagtgaaatgtgtgtcgcactcgcaggcagaactaagctttcgtctcccgctctttatagttttggttgattttttactttttagtttcgaatgcaagtacgcaactgggtctgggctttgaactttaaaaaaccctagctagacttttgaactagtaccgtaccgggaatttaattttttttaattaactaatctatttatctattgtaatcgttattgtaagatttttatttttttaatattcttccaaaagatacttttgttatagcaactctaatgtttttttttgtcaaaaaaaaactctaatgttaattttactatagtttgcttaattaaattttgtggatttaatatacatacaagaatgttaactctactaaaatttacttaatcattttttactctaataatataattagcacaattttaaaaattgaatcaatcattgatccagttatgattctgaatcactatattaatgattgaatcaattacttattaattgaactgtttgactcaatctttattaaaagatttgaaattttcataacatgtctaaaaaaacctatatagtaatagttattattattattattactattatttagttaattatgtaacatattttctttatttaaattattattatttactttattgtattatatgtcatgctttgaataatttttattactatattattttattatattttataattattgttattatttggttattatattttattatgatttagttattatatcatattttgtttggtcgtcatatgcattacttaagatttaagaaatatcatgtttacttgcaacaaaaaattaagtgggttggagaaaagatcaaggaagtacaggacacggatttcaagttgtggtatacaggtacaacctaaagtcaaaatggggttagaattataattgatagaagtttcaaagataaattcgttgacgtcaaaaggaaatgctacaagattacgatgattaagcttgtagtggggatctaattttaaatattcttagtgtgtatgcaccccaatttggactactttcaagtgaaaataacaaatttttggaagacttagaggaggttctgagagggatatcacgagaggagaatattttcttagaagaagatctaaatggtcatgttggtaaaaacaatagaaattttgatagaattcatggtggttttggttatggaacaagatatgagactagataagatgtcttgaacattgcactagtctatgatttgatactagcgaacattttttatcggaaaaatgagtctcatcttatcacgtatcatagtgaccaaaattttagtcaaatttgtttctttatggttagaaggaaagatagaaattcgtgtattgattgcaaggtttactctggagaatgtgtggcaacacaacataagttggtaattctagagattaggttcaacaaagttcttaatttgaggaagaaggctcaaaacccaatgataagatggtggaagctaaaggaggagaaacaaatagagtttaaggaaaacatattgtgtgaaggaccgtgagagtttattggataagctaatgaaatgtggaataagatggatatgtgtgttcaaaatgtggtaaggacggtgctaggtgaaagcaaaggaaacaaagttcttagaaaggaaacatggtggaatggagaggtgtaggaggttattaaatagaagaatgaatgatttagatctttacataaatgtctcaatgatgagaatttgcaaaaatttagagtagcgagaaaaaatgcaaagaaagaagtacgggaagctagaggcaaagtttttgacgatttgtataaaatcttgagagcaagatggtgaaaaaatatttacaaacttgcaaaaatgagggataagaagaataaagacctcacccaagttagatgtatcaatgatgaaaatcaaaaactttggtaagggatgaagatgtaagcgaaagatgactaaactagtttaacaaactttttaatgggaatggcggcaatagtgaggtggatttggagaactttttctgatgatctaaatagaagatttgtgagcataattaatacacatgaagttaaggaggctttaaagaggatgaagaataataaagttttgggacccgataacgtccctattaaactgttgaggggcttgagagatgtggcagtaaaatggttgactaatctattcaataagattcttcaaacaaataagatgtctgatgcttggaggaaaaatatgtttgtgcctatttacaaaaacaagagagatattaagaattgttctaactataggggcatcaagctcatgagttgtactatgaagttgtgagagagagagttattgaacatcgtctaaggaaagagaccaaggtttccataaatcaatttgaatttatgccaggaagatgtaccatggaagttattttcttgatgcgacaattaatggaaaggtatagggaaaagaagaaagacttacatatggtgttcatagatcttgagaaagcataagatagggtcccaaaataagtcttatggtggactcttgaaaagaaaaacgtagcattaaagtatgttaatgcaatcaaggatatgtatgataggttatcacgtgtaaaagcttgtaatggaacatcaaggtattttcctatcacgttaggtgttcaccaaggttcagctcttagtctttatctctttgtcttagtgatggatgaactaacgagagatattagagaggaagtgccgtggtgtatgctttttgaagataatatcgtgcttattaatgagaccaaagacaatgttaataggaatctggaattatggagaaacactttggagtctaaaggattcatgataagcaagagcaagacggagtaaatgaagtgtgagttttcgcgggtaaggtagaaatgaagatgttaaggtggatgtgtggttatacgaagatggataagataaaaaataaagatattcgacgaaaggtatcaatggtactggtatgtgaaaagatgagggaacataggttgagatggtttggacacgtcatgagacagccactggatgctcccgtaaaaataaaagtttgttaccaatagctcgacacaaagagaagtagaggttgacagaaacttacatggggaaagataactaaacaagacttaatggagtgagatatagattggcggacggtatgtcttcgaaaggagtggagaaaagctataagcttgttggagggttaaacccatcagtagttttatgttccagtcattcccttttttagttattttccttttatttcttcctcttttcacccttcttttattttagtttatttttcctctattttatcttttttccaattttttcccctttccctttctctttctttgtcttattttcgatttatcattaggtttatataccaccaaccccaattaacttggattaaaggtgctgatgatgttggtgtttacttgcaaccaactttaggccaaggatatagtatgcaataaatgacatttatgtaattaagtggaagagattatatactttttatctctcataaaaaattatttcaaaaaataaatctctcataaatactaccatcaacatgaaaaaaaaaaattatgtgaatatgtaatggtcaattgagtgttgattaatatctataacttttgggagactcgaattaaatttcacttcgatgtattcaaactacatggtccaacaaaatactcaaacgcatttgcctatatgacctatatcccttggggtatgtttagagttgctaagatagcatggaaagggaagggcaagcaaagaagtgcattgtaatgtaggatttgagcagtttgggaaaatcgaaattgagccaaaatattttaaaaatggaatggaacccagaacacagtatttttcctctaagatgtgaagacaataatattgtgcttacgaaattacttatatgtccctatgactttgtcattttttctccatctgctttccctgtttgcatgcatgacttttcttctccatcgtcggctcctatcaactactatagaagctagtttattgtttttttttttttacaatttacatgtcctaaattatctcaattaatttgagcacctcgttatttgtggactttgttcatgttttgagctgagttgtgtttgtaatttgtatggttttattgtgcaaaaaaactttgctcgctacgctgcctcaacccactgcctttgcttgcagattggttattattgtttgttaaaattgtgttttgcttctttttttttaattataaagttttacttattaaataacttttatttaaatattgccctttattttcactttccttcttttcattcaaataacatttattttattttattttctcacctacttacttcctctccttctatttcttctcctcctatataaacacacccttaaaatcgtaaatcactatcattaggcagttctttgcactctagtgttgctgcctcttcttttttaaaactaaaagagagttcaacgcagtttagtggtggtaggagtaatgtgccaaagctcttgggtgacagtgtgaatgcataacctttccagatatgatttcatgtttttcttttttctctttttaaagatgttcaaataaggtaggagttagcaagaggaaggtggcaaaactttcctacgatggcacaaacgtcctcctccgacggtgcaaacattttgcttgcgagcacagacacataaccttactagttttgaactcttattttttaaatgcacgaaccgaactgggtcgtttcaacttgttggttcgccaattcaaccacttaaacagttgagtcataatgattggtttacatcggttttattgcatgttcagtctaatattttgctcgacccgtctactactttagttctcagttcgacatccgatccaatttttaagactatggtaattagtgaaatggggctcacttgttattttatattagcatattaaaattatttattaaaaatgtttttccttttcaattttcaacaaacacttttcaataatatttaatgtctctctatctcgtcttcttgtatacttattcccttcttttttcttatgttgattgattgcttcagtatttttcttcttcttataatttggtgttctttctcgtatatatattatttctcgcttttgatttggttaattattctttgtatcattcccaacacatttgcatcattttcacttcgttttgccctgcttcatcacatgcatgacttatacatggagatttctcctcactttgaggatttcatcattccctttagcgaaaatctctccatccacaccaccgacgatagacaataactccccttaatacaaacttacaacatttattatattacacaatccaaatagtaactattctaaaaacctgtggttttgaatgatttatatattggagaactaaaacaaagagcttctcccacacccttgactactttgacgatctcaaaatccatcatgtattcaacaatgttagagtttaagcgcacaatcttaaaaaatgtaattagcggaagtaaaataaaagagaaaaaacacgagtattttacttggttcactaactaagagaaactttttgttacctacatctaagagcaaataacctggcgtccttttactcacactaaaatatcaagaacagttacaaccgagttcaccttaaagatacatagtcaaatactcaacaagaacataagcctcacgattacaaacaagaaagaaagcaagaaggtttacagggtacaagagataaccactctacaccaatgtcagaatcaaacattacccagctttcagcgttcctctccttcagctcctttcagagaataacctcaagaacccgaagacggaccacacccgagagagagaaccttcacctgcaattcagacaaaaaaatgaacaaaacaaaggacaaagatctatgtactcatcatctttttcgttctacccataaagctcgaggtatcaaccaagaacagtaaaccctaacagaactaggtcacataaccaaagagagaagaagatgatcagagatagcatggaagcttcgagagattgcgagaaataagaagaaaaaagacaaaaaatgaaaagcaaaaacgcttatatattaatgaaggaaagagcaaaatgcaccgtattactaatgggtcaacaaaaatgcttttgcacttcactaactcaacaaagaactttctcttccccaatgatgataattccacctgtaatttttattttgaaattcatttatgttgggcaagcacgtgcaaaaccttatttgattttgggtcacatattcaaatcaaaacatatttatataatttagtaattaaaatattcaaataattttttttatataagctatctgatttcattcgtataattatgctcatatcaataaatagttaatacatacaaaaataataaatagttaatatcagtaaatagttaataattaataattaatatatggtaaaccttgtacctatgatcgagagcatttgaataaaatcaagcattccttgtcggaggaggtgaaagaagaaaaaaattttctgaaaaatcctctactatatttttgttgcacaattttaaatttaaattaaacgggcatgaaagagacaagacacgatcctacgtgtccaaaatcaaagcaaagccaccttagcaaggcacgttgacacggctcctacagtctccattacgatttttctcttttaactttgaagtatttattatttattatttattattacagctcctaaatattttcgcttcgcttgctcggtgtgtcaataggagacgagatctatgcttctcgtctcgtcattgtagacgcacgccagttcaattccactccttcgttttattcgtgtcagaccttcaatttcccgtttcgtttccacgtctctctctctcctcttcgttttgaagagggtccaagtcttctcttccgctgcttccagatctcgcagcgatttggatcctcctcaagctccttctctctcttcactcttccaccctccattgacgaattcaattcgccggttgcagatcccaatcttcgatttccagttccttgatctaagccaccatggcggccgcgaatgctccgatcaccatgaaagaagccctaactgtgagttcttgttctccttcgtttttctattccctcgaactttgttttattcagatcaattcacagttatagctccggaagcaagaactagaacacttgcttgtgatgattattgatgctttgctgtataatcggtcaatttcggtctccaagccaagtatgctgcaattttagtttactagtttgcttactgacaagtatgcgcagatctgattttttttttgttcgctttctgaactggagagtgagaagcataatttttcgttgttgctgatgtattcttttgctagatagagatttgagtgatgtggtttgtgtgatctgtcttgtgattgcagttgccgagcattggcatcaattcgcaattcatcacgttcacgcacgtgacgatggaatcggataagtatatatgtgttcgtgaaaccgctccacagaatagtgtggttatcattgatatgaacatgccaaatcaacctttaaggaggcctatcaccgcggattccgctcttatgaatccgaattctagaattcttgctttgaaaggtacgacgtatttcataacaatattctcctgaatttgtgacttgtgagttgtgttctgttgttactaatattctcgattctttatctggcaccttggtattgatatgaattctgtctttgtggataaaaaatccattggaagctttctttcaacagtttttcttctatttattttttcttcctttagttgtattatttttgttgatgagattgttggatgaaatgaaacaaactgcttaattatgactagtatgacttgaagtatttgaacacgtctagtcatccataacatatctacttctaattccgtggttcttggactgtctctggcacggtcaggtactttatatgcatcctgatcgctagggccacagagctgtgaagcagggaactttgattggtttgagaagctgaaataaactggcatccttattttaaattttatatataatatataatgaagttaaagtatcatgtttttaagtgctataatagtatttgttggaaaaaaaggtattgtacattgctctcactcttccacaagaggatacaaggagggactctattagatgaggaatttatttatgtagatactagaaaaaaaattatgtttaaactagaactttattctggttaattttaataaaaatatatgaacattatccgataaatattttttcttacttttgctaatatatcaataatccccaatttcacattaggcctattagatgttgcagtcctacatatttttcatgctgtcatcgtttgaccaggttttcagtggttaaaagaaaatttttggtattaagatgagctgcaatgttcatagaccataatgctcccagatgttgagcagtcttttaggtttttagtttgttgtgcatgtgcttctgttggtgctgcttttgaaatattgtttacttttggattatcttcacttacaatttacatcattctcttgaagcccaactgcaagggactactcaagatcacctacaaatatttaacattgagatgaaagcaaagatgaaatcatatcagatgcctgagcaggtaactattatgcacaaggacacgtatattgtaacatagtaggtccaatattgtaacatatattgttaatcatgtataggtagtcttttggaagtggattagccccaagatgttgggtctcgtaacattgacctctgtataccattggtcaattgaaggtaagatgatagtttgcttaactaaatttttttgtgttatactatattttccagtttacatattctttatacagtgtgcttgtggtttcagcaaattgttgactggtacatggttcatgatatatataacttgtaggtgactctgaacctgttaagatgtttgagagaacagcaaatttggcaaacaaccagataattaattatcgatgtgaccctacagaaaaatggttggttttgattggcattgctcctggtgcacctgaggtatatttctggttcctattgtagtcattgttatcaatcccaaatagtggtgcagagtggtgaactttaaaaccgatagcgaataacaggatgaccgctattctaaagctatatattcaatttaaataatttacatttcacatttataaatgctcaaaagtaaatttacataaagggaaagatataatcataattaataatacaaaatcagattcttaaactaaacacatagggtcaacaataacaaatgtaaaggaaataaaatatcaaataagtttaagcctccaagtggatgatgccatgattgcttgaaggtgaccaatgaaatgaaaaaaaaaatcataacagaaaacacaaagatagattagaggggtgagcaagtagaagaagaacaaaatgtggacttggaaaacattaaaaaaaaaaagtgagcaaatcggacataggctgacttggttctagttacggattgcttgatgacatgttgaaggcaccattttcagctgtgaaagataaagcaaaggaagacgccacaagggtgatggacagtcctgatatattcgaacgggttcagcctagaacctagagaatactctcacaatacacaagtatttgtcagaaaagttcaaataggtatattccattgcaatttagtgtacatataggcaatcaaccattaattattttaaatgcaccattaactgcaattatgaaggcaagactttaattcctaatggtgcacatgtaaagacataaggctatcagccactaaaataaaaaaataaaataaatacaactttatttaattctaaaatgaaaaatgtcagcaacaacaccctccaacacatgggttttcaataaaaaaaatttatcagcaaaaagtaatatgtattataataattagataagtacaactggtactgttatatttacattgtttccctgtttgtgtatgggtaaagtaatacatgttataataatatgtactataataattagatatgggtcttcaataataatcatgcactgaaataattttggttcaacgtccttcatcgcatgtatagttttaagaattgttgctaccacttgttgtagggtctcctctacctttctggctctggatctagtcataggtcctcctagtccttgtgtcggtccttgagcctcaatgtcctcttagtccttgaagaagctcaaggaccggcacaaggactaagagaacctatgaccagaaccagaaaggcagaggagaccctacaacaagtggtaacaacaatttttgaagttgtacctgcgttgaaggacattgaaccaaaattatttcagtgcatgattattttttaagacccatgagctggagggtgttgttgctgttgctgactttcttctttttaaaattaaataaagttgtaattctttttttattttattttagtggctgttagctttgtgtgtcttttcatgtgcataaagccttatcttcataactgcagttaatggtgcatttagaataattaaaggctggttgcctatatgtacacgaaattgcaatggaatggacatatttgaactttttagacaaatacttatgtattgtgagagtattttctagattccaggctgaatccatttgatcttattagggggctgttcatcacccttgtggcctcttcttttgccttctctttcattgctggaagtgacaccttccacctgtcatccgtaactagaatcatgtcatctggtatagaggcaggcatggcctttcttcactcaatagaacaataacataagaagtggttatccccaggctttgccagaaaggcctgggtttggtcagaaacaacattggtgagcactgagtgttggtggtttgtgtcaaaacaggtgagacaacagtgggtgcttggtgaatcaagcttcaaaaaaggttttgaaccctataagctgttttgatgaaaaggtgggagtgaaatcatgaaagtcactgaaaatattattggagaacttggaaaatggttgccaaaaaaagggtttccctattccagtgtagtggctacaacaactacgaaatgccactcatttgggcattgacacaaatgctttgtgatatctctatagtgctctgctctccactatgtgatactaaaccacaatagcaccactatcgcatgctcatgctcttgacatagttagctctcatgatgcaaatacttttttaaattttcaactttagtttaggcttttcattcaatattaatagttgtctttatctatgtttctgctggatttatctgtgtataattgtataagaattgtgatattttcaacgtgattttaacaaccctgatctattttggtttatttctccatattattttgcattgtagaggccacaattggtgaagggaagcatgcaacttttctcagtggatcaacagcgtagtcaggctcttgaagctcatgctgcatcatttgcccaatttaaagtacgttttttttttttttaattacttttgtcttcattttcccgtaatttttatttattatttcctgaataattgtatatatgctactgtgctggacaggttcctgggaatgaaaacccttctgttttgatttcttttgcctcaaagacacttaatgctggtcaagttatatcgaagttgcatgttattgaactgggagcacaaccaggtctgcatatttttagttcattcgcatttatctgtactgtatctattttatgggcaacttatgttttctagaaaaatctgtcttgcatgctgatttagttatatctctcgacttgatgaattttaattttcctggtaaacaaaaaaagagtaattctactcttctactctaattaacattgaactgagaatataactttcataaactttgatctgtggatgtattactctgatccatgatgaaggaagaggctactcattcttgccaataacttaggtacatgaaatgtattatattttgttgttggccatactatgaggattgttttccatttgttacgatgaccttggacagtttttataaatatatagatgataaacatgtgcaagtgtgaaatttgaaggtagatgaagcagtaaatatttactagataagggtaatattgaaattaaaccgtgtacatcattgtatcacctgtgatgaattgatcatgcttctagagtttgaattgttagagatatcatataaatcattcatgtgtctcttcacctaactgctgaagcttttgagatagttggtatcaaagtctctataactaatggtctagagttctatccttcctgtccccattcttctaagaaaaagttgaacttcagcacaggataggtgggggcctctgttcattatccatgcttcaaggccaaagggctctagcatgaaagggcatgctggaaaccataatatgaaaccactcatgcatcttcacttcacctatcaacttaaccttttgcaatagttgttccttgacaaacattactaatttgttggcagggaggccatcattcacaaagaaacaagctgatcttttcttccccccagattttgctgatgattttccagttgccatgcaggtacagaagttgctagtatttgtgtttcattttataaacagtgtaaatatttgatttctattttgattttttggcagatatcccacaaatacaatttgatttatgtgattacgaaacttggcctactatttgtctatgatttggagacagctactgctgtatataggaacagaatcagtccagatcctatatttttgacctcagaagctacatctgtgggaggcttttatgccatcaacaggagaggccaggttttattggctactgttaatgaacaaaccattgtgaattttgtcagtggccaagtatgttcctgaccttgttataacttttttgttgtaaagtggggtatgaatggcatttttacaaatttcatttgattattatcacagttaaacaatttggagctagcagttagtcttgccaaaagaggaaatcttcccggtgctgagaagctggtatgtcaattttgtgtagaactcaattttagtaataatattttttttcaagggtgttttcagtgagattcaaagaacttggatgcattgtcaattaatctcttgggggcatttgtttcacaaaatgatattgtattcccaggaatgttattcctgggaatacttaaaagtacatttggctagattttaacattcctaggaaaatttttaaaacttaaaataattgaaaataaaaaataagagttggaatggaagttatagttgggttagaaaataacttctcatattcccatgggaaaataaatttcccaccccttatcaataggaatagaaatgacttgaatcatggtataaccactgtctggaatatttttttaaaactcgttacatgggaatactaccttccctagttcacatttccaggaatgagattttaatccgtgaaacaaaaacactcttggggtttcatgtagctgataaatgcttacttgcatgaagttttgatacaaactacaataaaagtgctatattttgatgagtaattgttaactcttctttgtagcagacagccaaacactaattcagtttatttcgttggtgtttgacagacatttcttttccttactgttttttgttgcatatttgttttgaactgtcaacatattattttagagattctattttgtaaaagatttgtgctcaagtctaggcaggtatgtgattgaccttcatgatgcatgctgtagatctgttgcttctttcgtcatttacttcaatgcaatatacactgtttaatctctcttgttattgtatttttggttcttttattcatggatatgatgtccatacttgttgatattacaggtagtggaacgttttcatgaactgtttgcccaaactaaatataaggaagctgcagagcttgcagctgaatctccacaaggaatccttcgaactcctgacacagttgccaaatttcaggtttcttgattagatgttgctatctgagaattttctcttgcttttttagctacttcattcacagagattcattttctggttgtttactgtttgcctttaggtggtgtccttttgtttggtcaattagttgtaatgtttaaaatgccattatctgctttatgtggcagagtgttcctgtgcaagctgggcaaactcctcctctgttgcagtattttggaacacttttaacaaggggaaagctgaatgcctttgaatcattagaattgtcacggttggttgtgaaccagaacaagaaaaatctgttggaaaattggttggcagaggacaagcttgaatgcagtgaggagctaggagatctcgttaaggttgggttgcattaaaatttgaaaaattcaatattattctgttatttataactttgtactctatctttctaattgtctcccaaaaattgcgtaccgattctcatctaacctgtttattgtgaaatgttgtattctattaatttttacaagcatgctcccttgtagactgtggacaatgatcttgctttaaaaatatatatcaaagccagagctactccaaaagttgttgctgcgtttgctgagaagagggagtttgacaaaattctgatttactctaaacaggtgcctgtttacttatcaaagaatattgaagcttaatccatagaattatttaatgctattatggcatgtatagcattatgtcagcctgtataattatcattgcatgtattgccctttcattttactgtaaacatttggtcctgaacattgtattacttatttgttgctataggttgggtacacacctgactacctgttccttctgcaaacaattctccggacagatcctcaggtgtgagagaaacctctgcagttcatataatttttttagttgaacctgaaccatttctttgtagctccccttattgtctgcatccttgttatatctgtggtaactgtttttgttttgaacagtatatgtacattaagttgaaatgtttgcttacagttaccattttcattttgatttgcagggcgctgttaattttgcattaatgatgtctcaaatggagggaggtagcccagttgattacaacacaataactgatctctttcttcaggttggttatatgttgtgattaagcaattatgatgaatattaatatgatatttttgtttcataatcattgatttagtactgaatggttcttgaaattattgttattttccttttggttactttctgctcagagaaatctgatccgagaggcaacagcttttctcctggatgttttaaagccaaatctaccagaacatgggttccttcagacaaaggtgtggcctttgtttctcatctgttatgggcattttactctgaaaattctttctttgaagtgttacgatcttgtgaatcgctgttcaggtgttggagataaatctggtgactttccccaatgttgctgatgcaatattggctaatggcatgttcagccattatgaccgtcctcgtattgcccaactttgtgaaaaagctggcctttatgtgcgagctttgcaagtaaggactctccaaatgtgttttattactttctctatgttaatcttaaagtcaaaccctttgttgattgcattattcttggtgcagcattacacagaattaccagacatcaaacgtgtgattgttaatacacatgcaattgaacctcaggtttatgtgctgttctgcttttaatctcttagagtttaaaaattaaaacccattgtgtgagcttttaaaatacctactcattatgtggttgttacagtcactcgtagagttttttggtacactgtcaaaagaatgggcattagagtgcatgaaagacttactgctggccaatcttaggggcaacctacagatcattgtgcaggtatggtggtgtcattgttttctataacttggaacttatttaattattgttgacaaagctttcttatgtgtgttcaggttgctaaagaatattgtgagcaattgggcgttgatgcctgcataaaactttttgagcaatttaggtcatatgagggactgtactttttccttggatcatacttgagctccaggtaattctttcatttggaaaaaaaaaaaaaacttgtttttctgttggtaattgacctcattttattgagatattgtccaatgtgtttctgctgatgtatgttcctctaaataatatggaacagtgaggatcctgacattcactttaagtacattgaggcagcagcaaagactggtcaaattaaggaggttgagcgtgtgacaagagaatcaaatttctatgatgctgagaaaaccaaaaactttctgatggaggctaagcttccagatgcacggcctttgattaatgtttgcgatcgttttggatttgttccagatctaacacactatctatacacaaacaacatggttcgctacattgaaggctatgttcagaaggtataatagtagccttacttatctcgtgagtgctatctactctttttctctgcctttgtaaaactttgtgcctttctatacaggtgaacccagggaatgcacctttagttgttgggcagctgctagatgatgaatgcgcagaagattttatcaaaggcttgatcctttctgttcgttcattactgccagtggagccccttgtggaggaatgtgagaagaggtggtgtttgccctttgattctatgtgttattgctttgcattcgtgtttcttattttatcctgtggcttttttatatgcaggaatcgacttcgtatgctcacacagttcttggaacatcttgtaagtgagggaagccaggatgtacacgttcacaatgcactgggtaaaattatcattgatagcaacaacaacccagaacatttcctcacaaccaacccatactatgattctcgagttgtgggcaagtattgtgagaaacgtgatcccaccttagcagttgtagcttatcggcgaggacaatgtgacgatgaacttatcaatgtcaccaacaaaaattctttgttcaaactgcaagcaaggtttgtggtgtgtattggctcctctaaagtgagagagtatactttgccggataaaagtgtagttgcaaccattgattagaaaaccagcagttaaaattgttacaactttgaagtttgttgtacttgtattttatcatattctcaaccgttgattttctaatcaatggttataactgcacctccgtcactttagaggagctatatttgtggtccttaatctaccaaatcaattttatttaatacaatgttcacatgcttatattgtgatgacagatatgttgttgagagaatggatggtgatttgtgggctaaagttcttgatcctgataatgaatatagaaggcaacttattgatcaggttgtatctactgctttgcctgaaagctcaagccctgagcaagtttctgcagctgttaaggctttcatgacagccgatctgcctcatgaattgattgaacttcttgagaagattgtgcttcagaattctgcattcagtggaaactttaatttgcagaatcttcttattttgacagcaataaaggctgatccatccagagttatggattatgttaatagattggataattttgatgggcccgcggttggagaaatggctgtggaagctcagttatatgaggaagcatttgccatttttaagaagttcaacttgaatgttcaagcagtcaatgtgttgcttgataatattcatagcattgatagagctgttgagtttgctttccgagttgatgaagatgctgtttggagtcaggtggccaaggctcaactcagggatgggctagtaagtgatgcaattgagtcatttatacgagcggatgacgctacacaatttttagatgttatccgtgctgctgaagatggcaatgtttaccatgacttggtgaaatacttgctaatggtaagagggaaagcaaaagaacccaaggtcgacagtgagctcatttatgcatatgcaaaaattgataggctgagtgacattgaggagttcattcttatgccaaatgttgctaatcttcaaaatgttggtgaccggttgtacgatgaagcattatatgaagctgcaaaaatcatatttgcttttatatctaactgggccaagttggctatcacactggtcaaattacaacagtttcaaggtgctgttgatgcagcaaggaaagctaacagctcaaagacatggaaggaagtttgctttgcttgtgttgatgcagaggagtttcgtttggcccaaatttgtggactcaacattattattcaggtaatgtgttgatttcagttttttgatgaactgtgtgcgcgcgtgcgtgtgtgtatatatatatatatatatatagaaatgtttttcttaatttctgatgcagaccgagttcaatttagagagtttaagtgatctgggttttcagtatgtgatggtgaagcaatttccctaaaagtatgctgtgaaagcgtgaatgcgcatgatttatgattggaagggtgttgtgcttgttatatgaacttaatgttgatttgctggtagtgatctttttgaatttctaatgcttattgcgtcattttttttttaattaatttcataggtggatgacttggaagaagtcagtgaatattaccaaaacagaggttgcttcaatgagctcatatctctcatggagagtggtttagggttagaacgggcacatatgggcatctttactgagttaggagttctgtacgctagataccgccctgagaagcttatggagcatatcaaactattctcaacccgcctcaatattcctaaactcatacgagcttgtgatgaacaacagcattggaaagaattgacctatttgtatatacaatatgatgagtttgataatgctgcaactaccatcatgaaccattcacctgaagcatgggatcacatgcaattcaaagatgttgttgttaaagttgctaatgtggagttgtattacaaggctgttcatttctacttggaagagcatccagatcttatcaatgatgttctgaacgtccttgcacttcgtgtggaccatgcacgtgttgttgacatcatgcggaaggtgggatcaatattggcaaaattttcattagatattagttgttgcattgcatgccataacactaatgggaaatttcactttgatatgctataggctggtcacctccgtcttgtgaaaccgtatatggttgcagttcaaagcaacaatgtatctgctgttaatgaagcgttgaatgagatatatgttgaggaggaagattatgatagattgcgcgagtcaattgatttgcacgataactttgatcaaataggccttgctcaaaaggtgtggaaatttgctcttaattggaactattttttggtttcagttgtggaaatctcagattattgttgttactgtatgatgcagattgaaaagcacgagcttcttgagatgagacgtgttgctgcttatatttacaagaaggcaggtaggtggaagcagtctattgctttgtcaaagaaggataacctttacaaagatgccatggagacagcctcccaatctggcgagcgtgaacttgctgaggagttgcttgtttatttcattgatcaggtgctaaattcagtttcaaacttcatatataattcattttcttgcaatatcttatttgattaggtttactgttattcttggatatgttttgtttaattgttataatgtcatcctttgtacatgtctatgcgtacatagctactctgcaaccttctttgcagcaatggttattgcatactagtgggacctcttataatatgtgtaatttgaagtcatacacaaattatttgattccagagttattagtattttctttttgccaaagcctagtggctgttctgcaatagcatgccagtcttacaatcaaaactactgattgaaggattgtcattcaagcttcttacccaagggttcaagctttttagtttgtccttatggggtgatagtatttcaatttatttatatgcatataattgagatttctaaagtttcttttcatatgcttatgcagggaaagaaggaatgctttgcctcatgtctatttgtttgctatgatctgatacgggcagacattgttcttgaactagcttggatgcacaatatgattgactttgccttcccatatctattgcaggtttgcatttgttttatgctgctaatttgtatcacctgtagttataattttatgtttcatgattcaatgtgattcagctagctattgatttgtatcataagatttgatcatataatttgcaaagtctgatagtttatgatgggttgcaattttagtcagtccatttgaactgcttttttggtgaaacagtttaatcttcctctttacttataagatcaacttatttgtaaacacttgttcattaagtacttgattaaacagtttacccaaatgcacaattagtggtgcttagcttgtgaatattgtgattggtcttatgtacttccggtattacagaggttatgtgagcaagcaaatctaggttgactattgcagttattgtcttctcctgccttccattgagctgaaatgaatctatttattgccatcttatccagaggtttctctcatcatcaacttttttgctgttgtagtttattcgtgagtacactggcaaagtcgatgaactagtgaaggacaaaattgaagcacaaaatgaagtgaaggctaaagagcaagaagaaaaggatgtagttgcacaacaggtaattattttatgccatgctgtcactctgtcagcagtttgagtgttcagaaatgtttgctgttgataaatcctcatctttcgcattcttcatcctcgactttctcaacagattgaacattagagtagtgctgatatgaatgagatgtgctttttgttgcagaacatgtatgctcaattgttacctcttgctttgcctgcaccaccaatgcctggaatgggaggcccaggaggtatgggaggaggctttgctcctccccctccaatgggtggactggggatgcccccaatgccgccttatggcatgccacccatgggcagcagtttttgaagagtatagcatgaactcggcccctatgaagagcaatgtaggaacttcgaagttttgcgtagaagaatatcttgtgtgatttggatgcagcattctttctttgcttcgggtggcggtgggagatcccaagttaaaataatgtgaagtttttcggtttagattgtgtcataatagtcttgtaagtttattgttctttctgtgttgtagtcgaggcattttttgggctgctgattctagctaaccgataaatttctgtattctaccatttttcttgtattaaaccagttagtcctaggtaaaccaaacaaaaaatgaattacatctagtatatataagaaatttaccgactttaacagccagctttatatgtgcatgttgtggcctaaatttcctcacattttcttgatatggaagctaccggattatggaggcacccttgttaccccctgtttctgcagatccacgctacacccttggagacatgtttagagaaaaaccacattcatattagtgttccttgaaaaaccacaaacttatatatgcagctatattttgcttttagttctattaactcaatctcaacacttatttgaaagcgtcgcgatagctgacttgggttccaaatggcgctacatttggaatctaaacatacacgtggtttttttttgcaaatagggttaataaagcatggtagttgtttggtttgctactatttgattagatataaataatatacttttaatcttgagaatcctaattttgaatgtgtttttgagttggttaaattagacaagaacatagttatccaaagcatgaagaatttctcttttttctttctatgaatggtcaataaattccgtggaatgttggaagtggttgtagggttcaaagcataacatatttgaaaaatactatgtgcgtgcagtaatggcactgcagtgagatcagtcggttattgactagtagtcagactttgtaacttgtataagcgctgaactgctggagtatgagggtatcccccattcccttgtaccttcttttataagatatactgttcttggctcaaataaaaaacaatacacatgtatcgttctcaataataattagtgttgctgcatatacaagttttttttttttttttccgcaagaaaaatagtcattgtgatgagccttaacttagactattatttttaagaacaattcaagttaacatttttatgtatctctgttcctaaacaattactaaagtcaatttcattgttaagaatgtgcaaaaattagtttggtacaaaaattaaattgaatttaatcattttaataggttcggttcttaaatccaaattaacaaaatgttttatcaaactagttcgaaattgatttgattttaaagaaccggttcaaaatcaaaccgattttgaactaggaaattagttcatcgtgactgatgtgatacaatgagaaaatcaaaataaaaaaaaaaattcaattataaacgcatcaaatctctttatagtaacaattactctccattgagccatttattacgaatctatgcttgcaccttatctttacactatttaacctttctttgaccaaagagacaaggaggagtgcataggcctcctaccttaattagcttcagtgtttataacgctttatttcttatcattccctttcttgataaaaaaatcaaagatttttatttgagtttaattcattgatcttaaatttgagttagttgtattttatatttggagagaaagttgtcactcataataattttatttgtctcccacatgatttctcttaggaataacaatggataggatcctaaagcactcattttcatatccacatttaaaaattatacttgtattcggcctcatacccatatgggtaataattttaatcttcatctcggtattatatattcatatctgcacacgtgacccacaatttacttatgtatagggttaataataataaatcaataaaaatagtttaattaaaacaagtcaacataacattggtttgtctaaactcaagtcataaataaataaaatttaaaaaataattatccaatataccaattgttaaagttaatgttataattgtctaacaaaaactctaattaaaaatttaatatttttcactctttgagaatgatatttgttagagattaaagacttagaatattagtaaaagaaatataattatttttcacaattatatatatacattactattttgtaatatattatattattaaatatatacatatagatgacatatcataagagaaatatatcttaaacaatgagaggattgaatttagaccatataattaaacatggccagtcaannnnnnnnnnnnnnnnnnnnnnnnnnnnnnnnnnnnnnnnnnnnnnnnnnnnnnnnnnnnnnnnnnnnnnnnnnnnnnnnnnnnnnnnnnnnnnnnnnnnnnnnnnnnnnnnnnnnnnnnnnnnnnnnnnnnnnnnnnnnnnnnnnnnnnnnnnnnnnnnnnnnnnnnnnnnnnnnnnntaaaaaaaacaaaaaaaaaaagacatgccatctcactttgattgttttggtttgccacattttcaccgtgatgccttcactttgccgatgatatatagataaatattgaagatatgttttgagattatgggacccaaaagcctaaaatttcgatcagatattataacatgggttgagggaaagaaagaagaagaaagaaacaaggaaagagattgaagaaaaaaaatacggaatcacaagaaaccacacaatttgaatgagagataattgagcctaacaaagtgagtgattggatcagtagtcgtgtcactctttaaggtgctttattatgagttacaaattgagggaaaatgggaccctccagtgattgtaattgaagcttcctttgtttgctagcttgtgctgtagacagactaagtgagcttttcaatcagagcgccattaaagtgtacaaaataagccgcttttactcagtggcctgctttcaaattccacctttcaatcaagatacatgaggaattcaccaggaaataataatttgaaagaaatcaaagtaattaacctctcttccagatgcatgcacaattggacaaacccacttatttgtccaatatatatagagattggtagtaaatgtagtaattgtaacaggatagaattgcttgcgattcgtgtggtgcagtaatcccctaagtctctgctaacaatttcgacatatcattgatgtcttgtctggtagtacaaaatgtttcctttctattacttttaatcacaaaataatatagagatgggtaaaataggtccacaacataagttgtcttaaacttaatggacaatccgtttatcactgttgttacatcaggcatttgtctaattgtacgaacaaatcttgcattttttttttttttttttttgtgtacaaatgttctctttcagtcacctttttcatcttcctcatcatggcaaagactaaaacctcggttgggacagtatataatagtacagcaacttatgtggtgaaacttaaccatattgaagttcaatgtggaagcccttgatatagtatatctttgaatatatttcatgtgtagcccatatcctaggttaaggctttaaaataaaggagcatttttatttttaactgcaaaggtgcatgtaggttttaaatgtcagtcgagttgtgggtcacaatctttgacattatgaaaaattacagacaaatgcaacgacaattgcggccacgatacaattgtcgtgagttcaacaccagaggttaatattgcgatctcaaaccattttttaaaactgtatgtttaatcttatgaagtcaaatttcaagataagtactactagatctggactataatccacatggtgagcccaaatggttatgattgccatcagagcagacaaaaaactttatggctatacacacatatagaagaataagatactgttcgtgcatccactacatcaattgctcttactaggtcaagcgattccaaagttccacacagtggttcccaagtccatttgcaagatactatttcatttatggttcaaattcttagtcagcacggatactcactcattaagataagcctgtttgttgggccaggccacaccctcttgctttttattttggctcttcctttttctccttcttaaacttgagagattctttacaaagtctagtgagatttattagggaggcaaaaaaaaaaaaaaagattcttggtgaagtgacagtaggatacagccaaaaatgattttcatctgaccccattaaaggtcattgcatatcacaccaatcaccataaaagataagaagatcgcccattaagcaaacagtgtccatgaaatgggaaataaaaagctcacaaagcaagacacaagcattagaatggtttgtaatttgtgttgtgtgtgcatatggaaagttactactattctggctggcctctggctcaatgcaactctgcaccaaacagtgatcaattatctcctttttcagtcccaacaacaacacaacaaacactccctcttgttgctacttcaacttctgaccctgcagcagcagcctctcttcaatttggtgagttcccttcgtggcctgcgcccattgcagcagaagatagagctgcaagtgcttccaagagccacagccaagcagagaaaaggcgcagggacaggattaatgcacagcttgcaactctcagaaaactcattcccatgtctgataaggtaaaagggaaaaaaaaatcatgacgtgtttcttttaataagtggcatagttactcctatcaagtttactattttttaaatcttgcataatgttttagacaataagcaagaaagtggaattggtgaattacgtattctatgatgtatagggtatcatttaaggtaaattaaattagattcgatgtaacaatacattatgatatgatttgataaataattgctttactttagcatgtgatcaatgtgatcagggtctgatcctcaggtccacgcatatagaataacatttgataggacttggaagagactaattccttaaatacattttaatatttcggagggattaattttgactgtcagccaaaaataccttgggttaaaaaaagaaaataagatttgatccagtgtaaatttgtggcatttcaatgtttcttttttcatgatagatagcatagtcactttcaattccatgaataggtttactaggttgtatgataggccatatagatttcaattccactaacttgcccatctttagtaaaaaaagaagctatgagaaaaagaattatagcatgaatagctttacgataggttgtatgataggccatatatttcagttccactaactcccctatctttaatagagaaagaaactataaggggtaaatttatgtggttgcagatggacaaagcagcattactagggagtgtggtagaccatgtgaaagatctaaagcgaaaagccatggatgtcagcaaagtcattactgttccaactgaaactgatgaagtaacaattgactaccaccaagctccagatgaaagctacacaaaaaaagtgaacatattaaaggaaaacatcataatcaaagcttctgtttgctgtgatgatcgaccagaactgttccctgagctcatccaagtcctcaaagggttgagacttacagcagttaaagctgacatagccagtgttggtggcagaatcaaaagcatattggttctttgctcaaaggatagtgaagagaataatagtgtttgccttagcactctcaaacaatcacttaaatccgctgtgaacaaaattgcttcgttatccgtggcaacaaattgtcccactagaagtaagaggcagaggttcttcttgccttctcattacgtacaataattcattgcaattttctttttcatttttgtttttaattcttagaggggtcgtgtcagtagctcaaattattggttccatttttcaacatttatttaccggtcagatataaaactaaggaaagcgtaagtgttaattttgtgcctccaattatggtaggttacactgaaattaaaaagtagccggttaagcatattcaaagaccacttgttatgttacgtccaaaatagaaacatgagcttaattaccaatttatgcaagaaaatggagggggattgagagaaaatcttggtaactttcttcatttggattttatccaattagaaggataattggaaaaagaagaatcatgaacaataaacaattacattgatatacacatttaaacaacggaaaaatatacttttcaaagcaaaaatattaagtaactatactgtagctttcatcagaaagtccgtcgaattcaattacttctcaaaaacacactacatcctccaacagaattaacttaaggtgacccagtaaagtaaacaataattattaggataaattttaatgttatcttaaaatctatattatggcttaactcaacttaaaacaacattacttgaaaattattcttcacttatacgtactatttaaattatttaattagtgaacgcgagatttacaacaatactttattcttatttttttttatggtagatactttattcttaaatcatactacatgtgacttttagaaatgatttatggtgttgggaaatattgacacgtctagtcgagtaatcttcaatgtagtgcaacaagtcgttcctgtatggggcccaatattctctggttatttatacgcagaagcagcagatgatttatgagatgcaacaatcagtgataccattgtagataagaaccacgggcattattagattactataaaacaaaaggaacattatagaaaatgttcctttgaaaatgatttataaggggaaaaaggcaatcccctgttgcaatatgtgtttctttctctttttgtttttagaattgttttcttttttagaattgctttttatttctcctgaatttttatatgcgacggatttttaaccttcaatatcatttttgaataaaagattttgatcaataaattaaattcttaaaaaattatgaatacgaatttagtacttattctatatatttaagagactatcttaataataaataaaaaaattaactattaattaatgtgatggtgctttacttttaagaaaactaatttgatgataaaagtattttaaaattttgtttgagaaaactagctgaaaaattaattaaaagttaaaaagctatttggttgttgaaagttaaaaaaataatttattaaattataagtgtatgataaaattaattgttgaagtagttaaaaaatttaacatgataataaaaatnnnnnnnnnnnnnnnnnnnnnnnnnnnnnnnnnnnnnnnnnnnnnnnnnnnnnnnnnnnnnnnnnnnnnnnnnnnnnnnnnnnnnnnnnnnnnnnnnnnnnnnnnnnnnnnnnnnnnnnnnnnnnnnnnnnnnnnnnnnnnnnnnnnnnnnnnnnnnnnnnnnnnnnnnnnnnnnnnnnnnnnnnnnnnnnnnnnnnnnnnnnnnnnnnnnnnnnnnnnnnnnnnnnnnnnnnnnnnnnnnnnnnnnnnnnnnnnnnnnnnnnnnnnnnnnnnnnnnnnnnnnnnnnnnnnnnnnnnnnnnnnnnnnnnnnnnnnnnnnnnnnnnnnnnnnnnnnnnnnnnnnnnnnnnnnnnnnnnnnnnnnnnnnnnnnnnnnnnnnnnnnnnnnnnnnnnnnnnnnnnnnnnnnnnnnnnnnnnnnnnnnnnnnnnnnnnnnnnnnnnnnnnnnnnnnnnnnnnnnnnnnnnnnnnnnnnnnnnnnnnnnnnnnnnnnnnnnnnnnnnnnnnnnnnnnnnnnnnnnnnnnnnnnnnnnnnnnnnnnnnnnnnnnnnnnnnnnnnnnnnnnnnnnnnnnnnnnnnnnnnnnnnnnnnnnnnnnnnnnnnnnnnnnnnnnnnnnnnnnnnnnnnnnnnnnnnnnnnnnnnnnnnnnnnnnnnnnnnnnnnnnnnnnnnnnnnnnnnnnnnnnnnnnnnnnnnnnnnnnnnnnnnnnnnnnnnnnnnnnnnnnnnnnnnnnnnnnnnnnnnnnnnnnnnnnnnnnnnnnnnnnnnnnnnnnnnnnnnnnnnnnnnnnnnnnnnnnnnnnnnnnnnnnnnnnnnnnnnnnnnnnnnnnnnnnnnnnnnnnnnnnnnnnnnnnnnnnnnnnnnnnnnnnnnnnnnnnnnnnnnnnnnnnnnnnnnnnnnnnnnnnnnnnnnnnnnnnnnnnnnnnnnnnnnnnnnnnnnnnnnnnnnnnnnnnnnnnnnnnnnnnnnnnnnnnnnnnnnnnnnnnnnnnnnnnnnnnnnnnnnnnnnnnnnnnnnnnnnnnnnnnnnnnnnnnnnnnnnnnnnnnnnnnnnnnnnnnnnnnnnnnnnnnnnnnnnnnnnnnnnnnnnnnnnnnnnnnnnnnnnnnnnnnnnnnnnnnnnnnnnnnnnnnnnnnnnnnnnnnnnnnnnnnnnnnnnnnnnnnnnnnnnnnnnnnnnnnnnnnnnnnnnnnnnnnnnnnnnnnnnnnnnnnnnnnnnnnnnnnnnnnnnnnttttcatttatttttctcctaccaaaaacctaaaaaatcatcttactttcaatttttttatctcttttcatttatttattttcattttctttccttttacttttttctcaaaatcgaacacattctaaaggatatcatcacctaatatgatcacaatttgtaaagctttttggggctttctgaacaatgtagggactatttagagacaaattactcaattaggatacttaaaaaaatgaatttttgacttggactggttttcgttatatgaaaatccactttattagtaattatcttgaatattgcacgaatatattttagatatttgaaaaataaaatagttaaactcatagtaggaaatttgaataatatgcataagattccaagttcaaatattatcgttattattatataacaaaaaaaagtttaaatttaaagaaaaatgtgtgtaactaatttaaataaataagtaaaannnnnnnnnnnnnnnnnnnnnnnnnnnnnnnnnnnnnnnnnnnnnnnnnnnnnnnnnnnnnnnnnnnnnnnnnnnnnnnnnnnnnnnnnnnnnnnnnnnnnnnnnnnnnnnnnnnnnnnnnnnnnnnnnnnnnnnnnnnnnnnnnnnnnnnnnnnnnnnnnnnnnnnnnnnnnnnnnnnnnnnnnnnnnnnnnnnnnnnnnnnnnnnnnnnnnnnnnnnnnnnnnnnnnnnnnnnnnnnnnnnnnnnnnnnnnnnnnnnnnnnnnnnnnnnnnnnnnnnnnnnnnnnnnnnnnnnnnnnnnnnnnnnnnnnnnnnnnnnnnnnnnnnnnnnnnnnnnnnnnnnnnnnnnnnnnnnnnnnnnnnnnnnnnnnnnnnnnnnnnnnnnnnnnnnnnnnnnnnnnnnnnnnnnnnnnnnnnnnnnnnnnnnnnnnnnnnnnnnnnnnnnnnnnnnnnnnnnnnnnnnnnnnnnnnnnnnnnnnnnnnnnnnnnnnnnnnnnnnnnnnnnnnnnnnnnnnnnnnnnnnnnnnnnnnnnnnnnnnnnnnnnnnnnnnnnnnnnnnnnnnnnnnnnnnnnnnnnnnnnnnnnnnnnnnnnnnnnnnnnnnnnnnnnnnnnnnnnnnnnnnnnnnnnnnnnnnnnnnnnnnnnnnnnnnnnnnnnnnnnnnnnnnnnnnnnnnnnnnnnnnnnnnnnnnnnnnnnnnnnnnnnnnnnnnnnnnnnnnnnnnnnnnnnnnnnnnnnnnnnnnnnnnnnnnnnnnnnnnnnnnnnnnnnnnnnnnnnnnnnnnnnnnnnnnnnnnnnnnnnnnnnnnnnnnnnnnnnnnnnnnnnnnnnnnnnnnnnnnnnnnnnnnnnnnnnnnnnnnnnnnnnnnnnnnnnnnnnnnnnnnnnnnnnnnnnnnnnnnnnnnnnnnnnnnnnnnnnnnnnnnnnnnnnnnnnnnnnnnnnnnnnnnnnnnnnnnnnnnnnnnnnnnnnnnnnnnnnnnnnnnnnnnnnnnnnnnnnnnnnnnnnnnnnnnnnnnnnnnnnnnnnnnnnnnnnnnnnnnnnnnnnnnnnnnnnnnnnnnnnnnnnnnnnnnnnnnnnnnnnnnnnnnnnnnnnnnnnnnnnnnnnnnnnnnnnnnnnnnnnnnnnnnnnnnnnnnnnnnnnnnnnnnnactctatacatttttttttttttcagaacgaatagacatttaatttatttatattaaagtcaaaagtattaattttcaataagttattcaatcaattcatactgaaaattaaaatcaattacagtaaaaggtttataattaattaatttaaaatagatctatatattatttcaaaatatcattgaggtaaacttaaaaatgataactgcaatctttcaagtttgtaagtcaatttataacacaacaaattatacttaagccaaacttggtgagttcaagtcaaactttgtaactttaaattttatttaaaataatggtacaaacagtatatatattttgttaacaatataaagaagaaaataataatattatagatgctgttaggattcaagaaagtcacagttacaccaagggactttcaagccaagaggaagacaaattttaaagaaaaaggtcaagatgaaagtggaggggaggatgcacatcaaaagtaaatgaagatgtggaggtggtactaaatgaggaagaggagaaaagctcatgatatacaaggatagattccccaatcatggggaggacactatttagttgaggaaggaaatggatgatactcctaatgaagaaatgctataaaaaaaaatatgatataaggaggtaaaaaaggacggaactgtaaagccttatgttccaagtctagagatgccccttatagataacgaataagagagttggacagagtcatcgaagaaaacaatggcgataaagaattgggcaagaaggtgaattttagggttcatgaaaacaaacttcaaagaagctagaccaagggggtatgatatcgatatgtagatgtgccaaatgaatttaccttgtaaaattctttctcatcagaggagtatcaccatgtgttatgtgtgaaacaccttaggggtattaccttaagcatatcaaagaatgagtaaactatcatatataattataattatcatctgttaagaattccatgagataagtcatgcattatttttaagtaatgctatcatatacatgacataaggggtctctatacaaccgactaagttgtcttttattgaaatttgttataataaataaaagtgtcattcaaaatagaaataaaattaaatgaaggatgttttaagaatattaacattaaataggataaaattaattaaatttatttatatgtaagtacaacaaaaaatatcatttttttagagttccgaagagtagtttatataaaactttgcttaatcgttccacataaatataaaacattaacttttttgcatgcttagcatttattttttcttcttttctttctcacaataaagtattgaactaattaattcttcaaagagagttcttcttgtctatgtgatgatctcggacttctataccccgtccaagaggtgtctaccactttttggagataagtgatgaaactttgtccaataccaaaaaaggcaccttaagttagtattcggaaaggttgttaattgtttattctccttcctccaccaaaggaaactcctcaacattcatatacatacatagacaataattcattggttaaaatatcataagaatgactaaaaagatgatgaaaatgtaggttgttacaacggcctcacgcttagggtaaacatatatggccgcttttagcatgttagaccctggaacttagcgcgcataagtggcttttagtcattgtcacaattataaaaaaacaatttatggaaattgttcttaaggttcaagacaactttggattagaatgagaaatctttccttctcatggaatttttcgcgagtttagttaatttttatctattagtgtaaaaacttattggaaactatataaatataacttttaaaataattcttacagaagtccataatcatattatataaaaaaaattataaagaccacattgttaattgacaccgaaagagaaaaagaaagaaaaaaaaggtaataataaagtctttgacatataataacctttatatctgaattaaaacaaaacctttatatataccatcctttgttatcatatatgacaatcgataacaaaatagatgtataataaacttggatatattctaattaaatatatttttaactagtataagaggacaaccaattattggcgttggtgaagaattgaatcgagttatttaaagtttgaaaactcctccaaactcgagcatgtaccatatgcatgtctaactgcactaacaacttacagttgcaaaaaaaaaaaccctctttggtccttccatttactcatccaattcccatcccatcgtccaactacatataaccactcttaaatatattataaccgatggcagttacaccttcatgttcattttgacttcccatcagttagttggcctccctggctacatcaagattatgataataaataacaattaattcccgttataaaacaaataaataaaaagtcaaaaattacatttatagactgaatactccatcctaactgccacactcttggaaatcatcatgtctatccaactaaagttaaagtttaaaacaacacacattttaaattaatggaactaaccgtgagacgttataaaataatgacaaaagaatcagaacaggaacacgatcaaaatttatccttatccaccttccttgctagagtttctaggaaaaggcgttatttgaatccgttagataaaagaggaagttataacttcctccattattaattaatcttttctcacccactctcttcataaaccctcaattctctcaagaagttagaaaaccgacctctgaacttccacctacctaagtccaaaccataaacacccacacaccaaaaggttgtggaacagattggaaccagaaaccttcccgcatttgttatgttcaaaaatctgttatacttttaagtttttaaggttcgtgccaactaaatcctttttcattcatttatgatctaaacaagaaagcagatcgcataaaaacgtatatttaacaggcaccaacctttgtgtgttttctctggcattttctcgaacaggtgaaaggcgactacgatgatgaccggcggcgacgaccgcgtgaagggttcttggagtccacaggaggatgcgacgttgctgaaactggtgaacgagcacggggcacgcaactggtccgtcataagcgccggcattcccggccgttccggaaagtcgtgtcgtctgcggtggtgcaaccagctgagtccggaagtgcaacaccgtccgttcactccggcggaggacaagctgatcattaaggcgcactccattcacggaaacaagtgggccaccatctcgcgcctcctccccggccgcaccgacaacgccatcaagaaccactggaactccacgctccgccgccgtcgcgcggaggagcaatcctcctcctcgtcagcgtctccgcaggccaaacgtccctcatccttgtttgacacgtttcagcctctcaaaaagcagtgcattgaaaaggaaaatgaggaagagcgagcgccgagtcccgttacgacgtcgttgagccttttccctcctggggaaaaatcagaggaagaagaggaagaggagaaagaagagtttgttaatcacaaggttttggatcagaattactttatgcaaatgatgcagcggatgatagcggaagaagttaggaattacatggagactttgcgcaattgctaaagggatggtctctcccttgagcctggattagatcttcttcctccgacgcttccaaagtaaatgattctattttccattttttttcttcttcttttcgggggtttcttactgtttttggagttattctccctatgataacagtcttaataattcgttagtaacactcaatgtactcggtttaagatgaggttgatgaataattagtcagtaatacgtgaaatttttttgaaacatatgcaaaactataaacattcatatcaatttgaggtggattttgagaggaaacggagataaaaagtatatatatatatatatatatagatagatagatacttagagaatcacatgtgataaagtgacaagtttttttcaattaaatcatctctgacgaggaagatgactgtcacaacctcatcaacaacaaccaccacaagccaccttctttgcctgttattgttgttttccgtgtttgaaatgtttgagaatgtccatgaatttgaaaggtaggagatacaacggcacatggtgggaatgttggagtcgtcgaaaggaacgtggccgtcaaaggaggtgaaggcaagcgtaccgccgaagtggagaggctacaaattttggttgagaatcaaaattcgatttatattcattttcattttcatatgtatgtttatattcattttatatgtatacgttagaacataagatgagttaatatatatatatatatatatatatatatatatatatatgatagaaaatgtgaatgaaattctgaatgaaaatgtgaaattgtgaataaattgtatgaatgaaaaattgaagaagagaagaagaaatgattcaggttcaacaaaaagttatattcacatccaattacataaaaaataaaaagggagagattttttgtaggatgtaaaaaaaagaatatcaaataaaatttaatcaaaatacataggatatgattatattttgcccaaaaaaataaaacaaaaaataagataaaaaatttatttagtctaagttatataataatagagtaatgctatataagtatttctactaataaacattaagaatatcaaagaagagtattcttagaattcttcattcatcaattcatattataggaatacaatgagattttttttcttctttttagttataaaaaacatagatcactttttaaatatattaaatatttttgtatagtcttaattattgtgaaatcaattaaagagatctttatttttttatgaaaatatttatttattagactattaacaatataaaaacatccgttggtcaaaatcatatatttacataaatatttatttggatataagtcaaaatgattttgagcagcttactccatgttttattaggaaaggaaaagattaaattattttagactaactctctatagtttaattaattttttaatcaataccttataatttaatttatttttaactaaagcttaaatgccggtatgttcattaaacgttactgagttaacattttttagacggaattaacgtataattatcaatgttaggcttctcaactaaatatttacataaccatcgcatggttcgcctcaaatttatcctggtcctaaatttactaagtgatgacagcattaaaatatcctatattgacttgtatcctttatggtatatcaggatgaaacaaaagaaattaaagagaaaaaaaatacagaacatggtatgtttttgttttgttaagttagggataaaaaaaattttaatctatagaaattgaagacaagagtttacaatattttgtgcaacattttcaatcaattgaattagaccttttaatagttggagagaataaaaaagagagaatagagtgaataagagagaaacaaagaaagttaatttttacaaacaaaaaattaaatgattttttactacttttctttcaattcaaattttaaatttcatttcttagtttttcgctgtgactcgaaactgaccattagttaataatcacatgaaattttgactacattctttataaaccctccaatgctaagaaaattgatttctactttaacatttagaaattagaattatgaatagaaattaattagggtttttgtggataaccttgttctcacctgcaattattttccttaaagagactgttctaggaggaatattaagagcctaagacggctgtggataaaaaaccaaaccagacttcttattaaatgttggtcaaatgataagtttttttttaaagttaaagcaataatttaacaagcgtgtaataatggagtttagaaataagggtaaattgaaaagtaaggagtaggaattcaaatagaattgcaaaaaataagagcctaatttgtgttgtctaaaaaaccaaaggaatacaccatctctatttctgactcagaggtgacctttgttcgaatgtataaatattgctttctaaaaaatgttacaatagaaataaaagtgagttaaatacttaaattacaaatttctatgtgaatataatttttgtatttctcatccacattatcatcaatgacactccatgatattttttttttatattgcataaatttctcctttttaatatttacaacaacttttattatgcacaaacataatttgaagttagtgttaaaattcacaaatataaatctaggtggtaaaattagtaaattaaaaataatttgatgtaaattttataattaaaaaaaacaacataagaattgccgtgtgaatgcacatcgcaagttcttattagggagggaggttgctataataatggtgataaaagtaaagaaagtttctacaatctcaaaacatcatgcgataatttagtgattatttaataagtgttaacaaaatcaattttaaactctactttaacataaaaatgtaaaaaattatcaaaaatcaattatgaactcaatcaattctcctctaatataataccaaatgcaaaaatttatcaaaaatcaattattaacttgaaatcaattctttaacctgaaatcaatcttacacttaaaacgtgtcttcaaacccaatttgcaaaagtattccttacaagcaaaattttggtttcaaatatatttttgaaagtaaccaaatatgattttgaattcattttactcttaatcatacttttgaaaaatcccaaaaaaaatccaaacacatccttactctattcttaaaaagtgtgttgatgaacaacgggaaaaatttctcccgggatattgcccggctttagagccaatattagattcttcagtctttttactacctaactaaaccacaaattttgtaggccacatttatagaaaaagcagtttttgagcagacactcacttgctccttcttttaaagatttgtactggtgggattttaaacagcattttgttgcagaatatagattctcatagtcctcttttcatgttatttgtgcttacctttatcttcttttcgacatatagcataatgaggttttgcaaaccttggttgcaaactcaaaacattcatttaatcctagaatgatccctttaaacctatagcaaatttaaaatatcatactgatttgattgacaaaaacataaaaaactacttttcgcaaatttttctttctaaaaatattcatataatctaatacataacctaatgacaatcaatcatcctaacgaatcaaatctgttttggtcatttcagatggcgcacagaattaaactaggggatatgagaaattcacctctctgcagggatgagttgttcgaatggaacgctgacaatacttgaatcccatattgtaattcgcaatgatgagcattgccgtgcctagttatttatctatattatttggtgaaacactaaatttatgttttctttaaaattgacttcaacaaaaaaactgaaatcatcactggctttaattcctaatttctcagcgatatgtatcaatcaacaagcttttatgggtcagcatatcatgtacccgatcatatttcataaatggtgtttaacaaatactaaagagtaatgagataagattccaagtggcaatgcagcaacaatttttgagaaaatgttaaacaaataccatccaaatcatcctaagtaattgaaattttctttatcaacaaaacaattgaacggattaagccttcagatctaaatttgggggatacgattttggaataaagaatatcaattagatcataaaaaatttgaagcagatataatgtgaaattataataaccctaagagaatcagagatgcaaataagagatcatgttgattagcaaaagcagtaacaacattgttttgagctaataacataagacgaacataaattacttgaatccaacaaaatgtatcaaatatcaaaaaggagaaaccagtgccactaacaactgggtgtcccattcgacaacataagcaattgtaaaaacaacagaaacaaactaggtttaacgcactacttggatctctgtctcatctttcggcgcttcctcttcaacctcctcatacgcttcttcttccactgcaaaaaaaacaaaaagtcccaatcagacctcaacgcttaataaaaacacaaataggcaaaggaaatgagcgaaacaacagtgaacaattgaactcaccttggctctcatcgcgaacagaacaccaaaccctttttcgtttctgaaccctagccgaagctgctgagaagtaacagacgattaagaagaaatggaatgtgaaggttgcaacaatttatagcctacgagaaaccctagcaaattatgaggaagttttgggctctaacccaaaggcccagcctgtacgagtaatgagtcaataggcttaggaatgcctcaacaattagaatggcccgttaggtttgtgtttggagtgaagcacatgtgaaatgtatacagttttagtttacttctagaccagtaaaaaagttttctttttcttcttttaagtttatactgaaatagattatttatcgaataaatgaaattcattttaaaaaaatgaatttaattcaataaattaaagtcaaaacattaaaaaaaatgaaaaatatgttctcgtatcatatttgtttgtttggttggttactggttagtaacatggaaggaaggataaaattcctgcggaacccatattttgttttgctttcttcctcatttgagaagaaaaggatagaaatgtcttattcatttaaaaaactaaatttttcttaattttatatacttcttttttttagtatgaatatttgtgtcattttgtgtttttctttcctttcattttttcttcttacagcaaacaaagcattagagtaggatacatcttaaaaaataatttgtctataattgggcagaaaaggagagagcatatatatagaaagaaaccaatttttttatatatatatatatataatgttagtttggtgattaaacgaagaagaagggaaaagtgattctttccattaatattttaacaaaattaaccgttagtattatctattaaatatatatatatatannnnnnnnnnnnnnnnnnnnnnnnnnnnnnnnnnnnnnnnnnnnnnnnnnnnnnnnnnnnnnnnnnnnnnnnnnnnnnnnnnnnnnnnnnnnnnnnnnnnnnnnnnnnnnnnnnnnnnnnnnnnnnnnnnnnnnnnnnnnnnnnnnnnnnnnnnnnnnnnnnnnnnnnnnnnnnnnnnnnnnnnnnnnnnnnnnnnnnnnnnnnnnnnnnnnnnnnnnnnnnnnnnnnnnnnnnnnnnnnnnnnnnnnnnnnnnnnnnnnnnnnnnnnnnnnnnnnnnnnnnnnnnnnnnnnnnnnnnnnnnnnnnnnnnnnnnnnnnnnnnnnnnnnnnnnnnnnnnnnnnnnnnnnnnnnnnnnnnnnnnnnnnnnnnnnnnnnnnnnnnnnnnnnnnnnnnnnnnnnnnnnnnnnnnnnnnnnnnnnnnnnnnnnnnnnnnnnnnnnnnnnnnnnnnnnnnnnnnnnnnnnnnnnnnnnnnnnnnnnnnnnnnnnnnnnnnnnnnnnnnnnnnnnnnnnnnnnnnnnnnnnnnnnnnnnnnnnnnnnnnnnnnnnnnnnnnnnnnnnnnnnnnnnnnnnnnnnnnnnnnnnnnnnnnnnnnnnnnnnnnnnnnnnnnnnnnnnnnnnnnnnnnnnnnnnnnnnnnnnnnnnnnnnnnnnnnnnnnnnnnnnnnnnnnnnnnnnnnnnnnnnnnnnnnnnnnnnnnnnnnnnnnnnnnnnnnnnnnnnnnnnnnnnnnnnnnnnnnnnnnnnnnnnnnnnnnnnnnnnnnnnnnnnnnnnnnnnnnnnnnnnnnnnnnnnnnnnnnnnnnnnnnnnnnnnnnnnnnnnnnnnnnnnnnnnnnnnnnnnnnnnnnnnnnnnnnnnnnnnnnnnnnnnnnnnnnnnnnnnnnnnnnnnnnnnnnnnnnnnnnnnnnnnnnnnnnnnnnnnnnnnnnnnnnnnnnnnnnnnnnnnnnnnnnnnnnnnnnnnnnnnnnnnnnnnnnnnnnnnnnnnnnnnnnnnnnnnnnnnnnnnnnnnnnnnnnnnnnnnnnnnnnnnnnnnnnnnnnnnnnnnnnnnnnnnnnnnnnnnnnnnnnnnnnnnnnnnnnnnnnnnnnnnnnnnnnnnnnnnnnnnnnnnnnnnnnnnnnnnnnnnnnnnnnnnnnnnnnnnnnnnnnnnnnnnnnnnnnnnnnnnnnnnnnnnnnnnnnnnnnnnnnnnnnnnnnnnnnnnnnnnnnnnnnnnnnnnnnnnnnnnnnnnnnnnnnnnnnnnnnnnnnnnnnnnnnnnnnnnnnnnnnnnnnnnnnnnnnnnnnnnnnnnnnnnnnnnnnnnnnnnnnnnnnnnnnnnnnnnnnnnnnnnnnnnnnnnnnnnnnnnnnnnnnnnnnnnnnnnnnnnnnnnnnnnnnnnnnnnnnnnnnnnnnnnnnnnnnnnnnnnnnnnnnnnnnnnnnnnnnnnnnnnnnnnnnnnnnnnnnnnnnnnnnnnnnnnnnnnnnnnnnnnnnnnnnnnnnnnnnnnnnnnnnnnnnnnnnnnnnnnnnnnnnnnnnnnnnnnnnnnnnnnnnnnnnnnnnnnnnnnnnnnnnnnnnnnnnnnnnnnnnnnnnnnnnnnnnnnnnnnnnnnnnnnnnnnnnnnnnnnnnnnnnnnnnnnnnnnnnnnnnnnnnnnnnnnnnnnnnnnnnnnnnnnnnnnnnnnnnnnnnnnatagaatgaattgaaatgaaatagaataaaaatatcacgtcagtatctgaaagttttacaatggcatgaagcagaactttcatttagtcgatttaaaaaatgagatgaaacgaattataacattttaattagtatattttttttgtgaaaacattttaattattatattattcttctttttaattatttttttactgcatttgatttattttatatattcaaaaatacttttaagaaaacaaccttaaagcatatatattttaaaacaaaaaaatatatttacaaccaagaaaataacattttgtaagaaaataattatttctctaataaatatcctttatattttataagaaaataaagttttgcctgaagaaatagcattgtataagatagtttgctgtgaatttatctttaattaaaataatttttaaatactattagagctgccatatagcaccaaattattttgcttaaattcacatctaaaatcaagtatttaaacacacaattaagttgttgttgtggctgtctttgcgtagtggtaccgtattttggatagacattttagggatgtaagattgagtaaaaaattcacaaagggggagaacataacaagaagtcaagaagggcacacaactattagacgatatgtttgtagaaattaataaactagaacaagcaagaacttcaacaacaaagcaagggcctgtcccaataataattgacagtaaattaaagaggcttattggcggcgaagttaatagtactaaaatagtattttcacaatttatagtaactttttgcttcannnnnnnnnnnnnnnnnnnnnnnnnnnnnnnnnnnnnnnnnnnnnnnnnnnnnnnnnnnnnnnnnnnnnnnnnnnnnnnnnnnnnnnnnnnnnnnnnnnnnnnnnnnnnnnnnnnnnnnnnnnnnnnnnnnnnnnnnnnnnnnnnnnnnnnnnnnnnnnnnnnnnnnnnnnnnnnnnnnnnnnnnnnnnnnnnnnnnnnnnnnnnnnnnnnnnnnnnnnnnnnnnnnnnnnnnnnnnnnnnnnnnnnnnnnnnnnnnnnnnnnnnnnnnnnnnnnnnnnnnnnnnnnnnnnnnnnnnnnnnnnnnnnnnnnnnnnnnnnnnnnnnnnnnnnnnnnnnnnnnnnnnnnnnnnnnnnnnnnnnnnnnnnnnnnnnnnnnnnnnnnnnnnnnnnnnnnnnnnnnnnnnnnnnnnnnnnnnnnnnnnnnnnnnnnnnnnnnnnnnnnnnnnnnnnnnnnnnnnnnnnnnnnnnnnnnnnnnnnnnnnnnnnnnnnnnnnnnnnnnnnnnnnnnnnnnnnnnnnnnnnnnnnnnnnnnnnnnnnnnnnnnnnnnnnnnnnnnnnnnnnnnnnnnnnnnnnnnnnnnnnnnnnnnnnnnnnnnnnnnnnnnnnnnnnnnnnnnnnnnnnnnnnnnnnnnnnnnnnnnnnnnnnnnnnnnnnnnnnnnnnnnnnnnnnnnnnnnnnnnnnnnnnnnnnnnnnnnnnnnnnnnnnnnnnnnnnnnnnnnnnnnnnnnnnnnnnnnnnnnnnnnnnnnnnnnnnnnnnnnnnnnnnnnnnnnnnnnnnnnnnnnnnnnnnnnnnnnnnnnnnnnnnnnnnnnnnnnnnnnnnnnnnnnnnnnnnnnnnnnnnnnnnnnnnnnnnnnnnnnnnnnnnnnnnnnnnnnnnnnnnnnnnnnnnnnnnnnnnnnnnnnnnnnnnnnnnnnnnnnnnnnnnnnnnnnnnnnnnnnnnnnnnnnnnnnnnnnnnnnnnnnnnnnnnnnnnnnnnnnnnnnnnnnnnnnnnnnnnnnnnnnnnnnnnnnnnnnnnnnnnnnnnnnnnnnnnnnnnnnnnnnnnnnnnnnnnnnnnnnnnnnnnnnnnnnnnnnnnnnnnnnnnnnnnnnnnnnnnnnnnnnnnnnnnnnnnnnnnnnnnnnnnnnnnnnnnnnnnnnnnnnnnnnnnnnnnnnnnnnnnnnnnnnnnnnnnnnnnnnnnnnnnnnnnnnnnnnnnnnnnnnnnnnnnnnnnnnnnnnnnnnnnnnnnnnnnnnnnnnnnnnnnnnnnnnnnnnnnnnnnnnnnnnnnnnnnnnnnnnnnnnnnnnnnnnnnnnnnnnnnnnnnnnnnnnnnnnnnnnnnnnnnnnnnnnnnnnnnnnnnnnnnnnnnnnnnnnnnnnnnnnnnnnnnnnnnnnnnnnnnnnnnnnnnnnnnnnnnnnnnnnnnnnnnnnnnnnnnnnnnnnnnnnnnnnnnnnnnnnnnnnnnnnnnnnnnnnnnnnnnnnnnnnnnnnnnnnnnnnnnnnnnnnnnnnnnnnnnnnnnnnnnnnnnnnnnnnnnnnnnnnnnnnnnnnnnnnnnnnnnnnnnnnnnnnnnnnnnnnnnnnnnnnnnnnnnnnnnnnnnnnnnnnnnnnnnnnnnnnnnnnnnnnnnnnnnnnnnnnnnnnnnnnnnnnnnnnnnnnnnnnnnnnnnnnnnaatcttcaaagactaaaacctgacagctatatttgcagagaattaaaatatatttaaggtttttatttcttactttattaggacataaagatgtatcctcatggttccatcgtgcgaaatcttatcggattaagcaacaatgtttttcttttggttagtccttaaattccacaactagtttcatttaaagtttgaaatattcctaatttgagcgaaaaaattgtccctaatctttttttatattaagatattatatttttaaaattttagtaaattaaattttatcctttttatttatagaacttttattcaaattaaacttattatatactacttctttgtgtttgatgtcctaaaacattttatctctgtactttaacttcctaaaattaaaaagaaaaaagacttcaaattccgtttgaaaactgctaacttagcatgaaacacgcattgtaaacgtaatccaattggtgggaacttgcgattggagaaaacatatataaaaatcaaaacaaaagtcttgacataaagtcacatggatcaacaatggagtgaactaattgaaaatgagaagaataattataaattttcatactctatcatcttacaaattattctatttttttatatttcgaaaatattaaatatttttacttctccttcaatcctttgaagaaaaagaactaactaaagaccatatcttacttcaaaaaaatgatgaagaaaaaagggatatccttttttaaaatgttttcattagcaatgtttttgaagaagaaaaagaattggaacctttgctccatcataaaaatgagtagttataaaaaaatacatattttattacaaaactttcatgacttacaaatggaaattgaggtggttcaaaaagatttaaaagtgatcaacgaattacaagagatcataaaagataataataagatatttaggaggataaaataagagaatataacgttctcaaatggaaaaaaaaaggatgaggggtcgtagcatagtcgtactttttcatgtttcggggtcccaacttaacaaaaagtccccattatctagttgcacaatataaacagaacatataagagcaatattattttaggacttacatagatgaggggtgcaaggaaattatattcttacctttttgaaccccggtcttgtacttttccatcacccaacgtgggaacaaaactcaatcagaaaataaaaaataaataaaaaaacccctgtcttggacctttgtcacatgtgaaggaatttcttgggtaaccctttttctttggctttggcaattggcatcttccaacttattatcaatatttaattaattctgaataaatatttaaactccggcaaatgcgactaataatttatcacaacattccaaattaaaaaaatacaacaaaacatttaaaatagctaaccataccttttttctgtattttaatgttcaaatggtaaattagactcaattattttgattccacttagactaaaataaaataataaatttcgttgatgttctttattctcaaaattaagtgcctctttacctgaatcagaaaactacttttgagggtaaacctaggtacttatctcctaattcaaagtcagtgactaatttttaaattattaaaatctatttacaaaattgatatctcattaattcatatatttagatattaaacagcggtgattttaatgaatagatctagatttagatggttatcgatatcgaaaatataaaaaattatataaagttgatatgttgctagaggtaagaaaattcaaactaatataattcgatgcacattacagagacctttaattcaaaactcagcccacatatataagagatatactagttacttatccaacgtatcaaaccatgtcagtaatgagttaagtactacaacttgtagtttaggaatatgaactttgaattaattatttatatttgttatttatcataaaataagattaattgaaagcaatgccctttatggaaagaaaaaaagctgttaaactatcaatatctctaaggattcccttcttggttcttacaacgatttacattgctcaagacaaataatccaaaacaagtggattagggatttactattactattactattactaacttactgttgaagttacaaatcgaaaactgaaaagaaaaaaaaagggatcagaccggaagactagttctaaagggtggcgattggatcaaaatcgcggggaaggaagaagaatcgagcttgagcgaagctctgcagagagggcaattggagtgattcgttagccacttgtccacgcactcacaatggaagctgtggtcgcaccctggaagaaccttcagcttgtcgccgtcggcgaacgcgccgaggcagatgcagcactccgtctcctccgccgcctccgccatgcggttgcgcctcgggtggaggacgatcgggagcctcttgatcgcggcggcatcgaggccggtgttctgcggcggcgggacggcgtcggggaggaggaggccgttgtggtggtggtggcggcggcagatccggcgggcgaagaataagaacgcggtgaagaggaggatgatggagaagaggacgataatgaaaaagagcttgcggccacggatttcgagggtttcgtcgtcgagttcagtgtcgtagtgccaattcagtgattcagagtcacgaatcgacatcgtggagcgaaacgacggcgtttagaatcgccgcacagtgatgtggtgtgaacctgcaatgggcacagaacagctttttgagtgggttctgtatgttgctcaggctcagactgcttagtgagaagggatagaaatgaagatccaaatagcattatttatagttacgtttggtgattaggattaggtatactctctcagtggggcacacgactctttggggttttcaattttatactaagtgcaagtgtttatcttaataatgaaaaaatgcttttaaaaataataataatctaaacaataaaaaataaaaacgagtgcgtatttagtttatcatcatgtttgatttacatctagcttattgtgcacaaattccaatataaaatctaaccaccaatcaagattaaacgaaaaaagaaggatgcaaatatttttgttaatcttattttattacaaacgtctgtttagaaacggttacttttagaaatagtatctaattatttgtttttaaaagttttttctatataaaaaagtatttttagaaaattaaactaaatacacattctattttaaaaataattgtttaattttaattttttcccttatattagtacaaaaataagggattgtttttatataataaatttagtcgataggtattttatttaatttaataatttgaaaagtatatgttgatgattacaagaaaaattaagtgattttcaagcaaacaagttaaattgctctcttacgttacatgttgtccacttatttgtttttttttaacgtacacatactatacaaataagttaaactatttcccttagaaagtaaaaaagnnnnnnnnnnnnnnnnnnnnnnnnnnnnnnnnnnnnnnnnnnnnnnnnnnnnnnnnnnnnnnnnnnnnnnnnnnnnnnnnnnnnnnnnnnnnnnnnnnnnnnnnnnnnnnnnnnnnnnnnnnnnnnnnnnnnnnnnnnnnnnnnnnnnnnnnnnnnnnnnnnnnnnnnnnnnnnnnnnnnnnnnnnnnnnnnnnnnnnnnnnnnnnnnnnnnnnnnnnnnnnnnnnnnnnnnnnnnnnnnnnnnnnnnnnnnnnnnnnnnnnnnnnnnnnnnnnnnnnnnnnnnnnnnnnnnnnnnnnnnnnnnnnnnnnnnnnnnnnnnnnnnnnnnnnnnnnnnnnnnnnnnnnnnnnnnnnnnnnnnnnnnnnnnnnnnnnnnnnnnnnnnnnnnnnnnnnnnnnnnnnnnnnnnnnnnnnnnnnnnnnnnnnnnnnnnnnnnnnnnnnnnnnnnnnnnnnnnnnnnnnnnnnnnnnnnnnnnnnnnnnnnnnnnnnnnnnnnnnnnnnnnnnnnnnnnnnnnnnnnnnnnnnnnnnnnnnnnnnnnnnnnnnnnnnnnnnnnnnnnnnnnnnnnnnnnnnnnnnnnnnnnnnnnnnnnnnnnnnnnnnnnnnnnnnnnnnnnnnnnnnnnnnnnnnnnnnnnnnnnnnnnnnnnnnnnnnnnnnnnnnnnnnnnnnnnnnnnnnnnnnnnnnnnnnnnnnnnnnnnnnnnnnnnnnnnnnnnnnnnnnnnnnnnnnnnnnnnnnnnnnnnnnnnnnnnnnnnnnnnnnnnnnnnnnnnnnnnnnnnnnnnnnnnnnnnnnnnnnnnnnnnnnnnnnnnnnnnnnnnnnnnnnnnnnnnnnnnnnnnnnnnnnnnnnnnnnnnnnnnnnnnnnnnnnnnnnnnnnnnnnnnnnnnnnnnnnnnnnnnnnnnnnnnnnnnnnnnnnnnnnnnnnnnnnnnnnnnnnnnnnnnnnnnnnnnnnnnnnnnnnnnnnnnnnnnnnnnnnnnnnnnnnnnnnnnnnnnnnnnnnnnnnnnnnnnnnnnnnnnnnnnnnnnnnnnnnnnnnnnnnnnnnnnnnnnnnnnnnnnnnnnnnnnnnnnnnnnnnnnnnnnnnnnnnnnnnnnnnnnnnnnnnnnnnnnnnnnnnnnnnnnnnnnnnnnnnnnnnnnnnnnnnnnnnnnnnnnnnnnnnnnnnnnnnnnnnnnnnnnnnnnnnnnnnnnnnnnnnnnnnnnnnnnnnnnnnnnnnnnnnnnnnnnnnnnnnnnnnnnnnnnnnnnnnnnnnnnnnnnnnnnnnnnnnnnnnnnnnnnnnnnnntattattatttataatttataataatttaaaatcaattaaggttgatttaaataattaattaatagaaatataaataggaaaataattatatatgaaaatattataattttttttaaaagaaaacaatctcatgtgcataaatgtttgagcttaataattatattttggcaattcttaaatataattatttgtctatttatattttttaagctgaaacgtttatttgaagttattttctgtcaataattaaattttggcaattttcaaatcgtgggaaccgaaatacgaggagggagtgtatgttaaatcatactataacacactaagcaaatacattatcactacgaaacaaattggatgagattacatacttgaaaatttaagaataaacttaccattcaaaaactacgtgccacacatgcatcgctgttggattattacttgctgtattattttatgtttgtttatttgaaagaaagaaaaaatgacagagatttttttaatttaaattaacgaaaattaaaataatattgatagaaagttaatttttcattttattttctctcaataagataaataaaaatatatcattattcatatgatatatatatatatatatatgtatatatatattctatcactattacttttaactttaatttacagccggccccgacagaggggattgagccctatcttctaacttttatgcagtaaaatttgcgtgtaatcacacacaaccaattaataactatcgtactctatgactttaactgttattaaccagttacatgtgctcaaagaatttttttgactttatctgaatcaatgtagagaatgatgtccgaattcacatttgtagataagatcgacaagtttaatttttacggccttttcacgttacgcgtttgaattggacggtaaaaatttcttgccgttagcaattttgtaatatttacctaataataaaaaatcattggaaggagataattatttttttatcaattattgtcgactaaagttgcacgttcatactttatgcatatgcatgtaccgtagtaccgtacatgatttcggtccattaggggtaacaccgtggtaccttatccgtaacaatgtcggatatgcaacaattttactggatgtagacgtacacaccaaatggttttaatgttacgtctatcattcaactattttgtctcacgcgaaatttttgggtttatccggatatatatattttttaatccatgaaaatcaaaattaatgtaaaatcagtattaaaatttttataataatttagcatcttatttaatcaatcgaattaaatctattgactaccaaaatgaatataataatagactagtagtgttatatatatatatatatannnnnnnnnnnnnnnnnnnnnnnnnnnnnnnnnnnnnnnnnnnnnnnnnnnnnnnnnnnnnnnnnnnnnnnnnnnnnnnnnnnnnnnnnnnnnnnnnnnnnnnnnnnnnnnnnnnnnnnnnnnnnnnnnnnnnnnnnnnnnnnnnnnnnnnnnnnnnnnnnnnnnnnnnnnnnnnnnnnnnnnnnnnnnnnnnnnnnnnnnnnnnnnnnnnnnnnnnnnnnnnnnnnnnnnnnnnnnnnnnnnnnnnnnnnnnnnnnnnnnnnnnnnnnnnnnnnnnnnnnnnnnnnnnnnnnnnnnnnnnnnnnnnnnnnnnnnnnnnnnnnnnnnnnnnnnnnnnnnnnnnnnnnnnnnnnnnnnnnnnnnnnnnnnnnnnnnnnnnnnnnnnnnnnnnnnnnnnnnnnnnnnnnnnnnnnnnataagattattaaagagaaaaatagtgttaacgtgctatggaaaatgtttgcataaataatataactctacatttagtttttattttaaaataattattatcttaaaatttaaaaaataatcaagagattcattaaatcattttaatttaaaataataatatgtttatatatttatttattatatcttttatattattaatgttgttttctttcggttattgaagatttatataaaaaacaataaaaaagttggaaaaaatgatatatattttttattttttaaaaaaagactctccatgaaatcggggaatttacgcaaataaatgatgtgtcatatttgactgaataacatatattagacttaacgaggatgactgacccaatgtctcattgaaaggttcatttttgaattaacttcacgctcaatcgatttatgttattgcaagaaaatcgtgggatttgcataattaatggcagaataacataaatttagactgcatggaataaccggcacagagtttgaagtcatagttgttattatgagcattattattccgtgagcgcctatgtgagcatcttcaataagatatgtttaattgggtttcttcaccatctttttgcagtctttttagtatttgttgtgattcttataatatcatatcactcataaaaaattcatataacattttactccaatgtaaaaaatcacaaaaaactacaaaaaatccacacattcataaaaaactacaaaaaattctaaaaatccacatatttatatttttttattacaacttaacttttttcaatttttataatacaaataaaacatatgaataattgaagaaaaataaaatataaattaaaaataattatattttgtatgagaacatttaaacagctatttcgtgtattgcattttttttttaaaactaaaacccaacataagccattaagcttactcccccatccacacacgtgtccattgtcgctagaagggcttttgcgaacttctttcttctcattctccacgcatgtcccttcttcagttcttcacttgatatttctttctttcttctcatcatttttcccaaacgaagcgcatcccacttcatcttcctcgagccaaattccttgcgccaccgtcgtcgctgtcgcgatctcttcactcgcgcgcgatgtcttctccaggcaccaccgtcggccgccacgacctcttcctcgagcaaccatcgcccgccgccgtggcctcttcctcgcaccatctggtttgttatttttcctcttccttttgttgggtagttgatctgaaaatgatattttattgttaagtttgagttccttatataagaagtgcatctctctcttcaaggaacggttccgccactcaaacactttctaatgaaaaattccttcacgaaaccgattcttcaactgaaagaatgcttggagcactccgcgttggagatgctcttagtatatgttatttttttttgtaagatttgatttactctcaagaaatatatttaattgatttagataacattttataaattaaaaatatatttggcaaaaaaaaaatataaaaaacaaaaccactatatccacatttcaacatacttaatttaggatcattcactaaccaacattgttttgcctattaatttcttttaagtcgagtgtttgtagaacaattttttttaatcactataaccatatcaagaaatttatttagttatctttaataaaaaaaatccttttaattatattttttttattcacaaaaattaaatacgaaattttattttaaaaactaaaccttattccactcattccacaacttattaatgctcatgggataagtttgaatatccttattgttgttcttgtcgacctgaaattttatcaaattaaatttgtaaattcaaactcgtcccaataatatttggaacaatataaaacagctcatttttttaaaggccaaaaaatattattaccaataataatgtctgggctacaagctataaccaacaccagaacactattacaaaagaaaaagatgctgacaaaaagtaacagcatcgacaaagcctacaaattaatctaaacaaagagatcatatttggtagggatgttcgcggtctggattggatcggttttgaagtaaaaaaattatccgattcaatcctttcggtttgatcatttgatcatccattcggtttgaaatttttttcaaatccgatccaatctaatccatttttttttggtttggattggatcaatttttgattttttaaaaagtctaaaaataaaacttatgagacttatttttatcaaaataaggaatatctagcataaacaaacacattcattgaacaaaaacaaacatcattttctaattttcattggacaaacaccttcattagacaaaataaggagcaatgtattggatttttggtttttggactatgataggaaataggcccaagtaggtaaagggtaaggtaaggtttataattggatcggttttcatcagccgatccgaaaatcgatccaatccaatgaaaattttcgattttttttcggttttcaatttttcgattttcaattatttcggttatcgatttttcggttcggtcaccgcagcttgcatctgtttggatcggttgatgaccacccctaacattcggtcttctcgacaaaacactgactttgtttgtcattttgaatttttttctcaaataaaatattaaaataggtgatcaactaaataggtgacatacattggttgtaaaaaataaccaatgttcttttatatatataaaatattgaatttaaaaaatgattgcgtcataaaggagtatgacgcctcttgcattttacatgataaaataatccatgacaccacccattttgatatatttttggaagaaagaaaaatcaaaatcttaaaaacgtgcaaaacattggaacaaaaggaaatatagtagtaaaaccaagcacaatgtttctgctcgaggcttatgcaactgagaaaatcctagctagctcacagctgcatctcatcagccaatgacaaataatcacaagcaagaatcacacgcaaccaccagcatcatagcaataatagttttaaaccacggttccacgagcaatacatgaaattggattggcacaccacgaagacagattagataaatccctccttgcgagctctaatccatttccaagctagaacctttgcatgatcttgaattgctgccactgagagaatattttctgagaacaccactttattccgtgctaaccacagcccccacacgaatgctttccttataattatgttccagcaatctaaataattttgaacacccaaagaactggaaaatatgattggaaatgttatttggccaagctgagactaccctcaaccacttgaaacattctgtcaagacctccgatgcacatgtacagccaaaacaaatatgattcaaactttcaagttctctgttacaaaacatagtaactcgtaacaactcaatttgttgacaatattaatcataacattatatatattagagacatcatacaattaaaaaaatatagaactattataattttaataatgtatgattgattcttttttttttaataaattacactttctaaaggaatatgacgcattagaccaattaagatgacccgaaatgtaactcaacttcatcctagaaatataagaatataatcttttaaatctaaatgcacgtttgaattaacatttaatttgtaaacttaagtttggataaactaagtttgaaaaatatctcaaatcttacttttataactgaatttttagtaaaaaatttactgttaaacttatttttaagcgataatcaagtttgatcccaaacttattttaccaactaaacatactttgaaaattcttctgccagaaatacaaacacaccctcaaaaatcccttggaaagagttatcactttccgtagttccgacgtgataagccataatataaggttgttctgacattaagccgaataaaacattccataaaaaagaaaggttacatatttccaacactactgagtccattatactgacgtcacaaaacaatatgacccgtacaacaatctgatctagttaaaacttcaaattaacttgggccgaacattaaaccctatgcatttttgttgggagttttttacttcacccaacatatctcttcatgcatatccaataatgagaggtaaaactaaaaatatctttacatatatatagcttatacaattattttaaaaaataattaatatcattatataaaatattaaaatttataatatatatttaatatacatatgaatttatataatacattttataacaattaattttgatctaacaatacatttttcacatatataaattttaaataaaattatagatttaaataaaaataataaatttaataaaaatttatatataaaaaatatattattatatcactattaattattacataatttattatgtaaacttatgtatattaaatatatattagagtattataacatataaatttatataataattatttttgagaacnnnnnnnnnnnnnnnnnnnnnnnnnnnnnnnnnnnnnnnnnnnnnnnnnnnnnnnnnnnnnnnnnnnnnnnnnnnnnnnnnnnnnnnnnnnnnnnnnnnnnnnnnnnnnnnnnnnnnnnnnnnnnnnnnnnnnnnnnnnnnnnnnnnnnnnnnnnnnnnnnnnnnnnnnnnnnnnnnnnnnnnnnnnnnnnnnnnnnnnnnnnnnnnnnnnnnnnnnnnnnnnnnnnnnnnnnnnnnnnnnnnnnnnnnnnnnnnnnnnnnnnnnnnnnnnnnnnnnnnnnnnnnnnnnnnnnnnnnnnnnnnnnnnnnnnnnnnnnnnnnnnnnnnnnnnnnnnnnnnnnnnnnnnnnnnnnnnnnnnnnnnnnnnnnnnnnnnnnnnnnnnnnnnnnnnnnnnnnnnnnnnnnnnnnnnnnnnnnnnnnnnnnnnnnnnnnnnnnnnnnnnnnnnnnnnnnnnnnnnnnnnnnnnnnnnnnnnnnnnnnnnnnnnnnnnnnnnnnnnnnnnnnnnnnnnnnnnnnnnnnnnnnnnnnnnnnnnnnnnnnnnnnnnnnnnnnnnnnnnnnnnnnnnnnnnnnnnnnnnnnnnnnnnnnnnnnnnnnnnnnnnnnnnnnnnnnnnnnnnnnnnnnnnnnnnnnnnnnnnnnnnnnnnnnnnnnnnnnnnnnnnnnnnnnnnnnnnnnnnnnnnnnnnnnnnnnnnnnnnnnnnnnnnnnnnnnnnnnnnnnnnnnnnnnnnnnnnnnnnnnnnnnnnnnnnnnnnnnnnnnnnnnnnnnnnnnnnnnnnnnnnnnnnnnnnnnnnnnnnnnnnnnnnnnnnnnnnnnnnnnnnnnnnnnnnnnnnnnnnnnnnnnnnnnnnnnnnnnnnnnnnnnnnnnnnnnnnnnnnnnnnnnnnnnnnnnnnnnnnnnnnnnnnnnnnnnnnnnnnnnnnnnnnnnnnnnnnnnnnnnnnnnnnnnnnnnnnnnnnnnnnnnnnnnnnnnnnnnnnnnnnnnnnnnnnnnnnnnnnnnnnnnnnnnnnnnnnnnnnnnnnnnnnnnnnnnnnnnnnnnnnnnnnnnnnnnnnnnnnnnnnnnnnnnnnnnnnnnnnnnnnnnnnnnnnnnnnnnnnnnnnnnnnnnnnnnnnnnnnnnnnnnnnnnnnnnnnnnnnnnnnnnnnnnnnnnnnnnnnnnnnnnnnnnnnnnnnnnnnnnnnnnnnnnnnnnnnnnnnnnnnnnnnnnnnnnnnnnnnnnnnnnnnnnnnnnnnnnnnnnnnnnnnnnnnnnnnnnnnnnnnnnnnnnnnnnnnnnnnnnnnnnnnnnnnnnnnnnnnnnnnnnnnnnnnnnnnnnnnnnnnnnnnnnnnnnnnnnnnnnnnnnnnnnnnnnnnnnnnnnnnnnnnnnnnnnnnnnnnnnnnnnnnnnnnnnnnnnnnnnnnnnnnnnnnnnnnnnnnnnnnnnnnnnnnnnnnnnnnnnnnnnnnnnnnnnnnnnnnnnnnnnnnnnnnnnnnnnnnnnnnnnnnnnnnnnnnnnnnnnnnnnnnnnnnnnnnnnnnnnnnnnnnnnnnnnnnnnnnnnnnnnnnnnnnnnnnnnnnnnnnnnnnnnnnnnnnnnnnnnnnnnnnnnnnnnnnnnnnnnnnnnnnnnnnnnnnnnnnnnnnnnnnnnnnnnnnnnnnnnnnnnnnnnnnnnnnnnnnnnnnnnnnnnnnnnnnnnnnnnnnnnnnnnnnnnnnnnnnnnnnnnnnnnnnnnnnnnnnnnnnnnnnnnnnnnnnnnnnnnnnnnnnnnnnnnnnnnnnnnnnnnnnnnnnnnnnnnnnnnnnnnnnnnnnnnnnnnnnnnnnnnnnnnnnnnnnnnnnnnnnnnnnnnnnnnnnnnnnnnnnnnnnnnnnnnnnnnnnnnnnnnnnnnnnnnnnnnnnnnnnnnnnnnnnnnnnnnnnnnnnnnnnnnnnnnnnnnnnnnnnnnnnnnnnnnnnnnnnnnnnnnnnnnnnnnnnnnnnnnnnnnnnnnnnnnnnnnnnnnnnnnnnnnnnnnnnnnnnnnnnnnnnaattagagtttgtaataagtaaattattttcaacgtccccaaatcaatattgggtcatgctaacaagaacataactctgaagataggagaatgtttgcatcaattagacaaataaaaagaattcttttttacagacaaactaattaagaacaatgtttattaacaaaataataataataataataataataataataataataataataataataataataataataatacagcttttttttctttttccaatcattcaatttctcaacttctggtttcacagttaaaattccatgaaaacctagaattatttgatccaagacaacaatgactacgtacattacatttaaacatcactgatcagtgcatataacttaatcatactttgaattgaagtccaaataatagaaagggcttaccgcataatctgacgaaaataatggcaagatatataactccatcattgatttgcttcccaatcaccagcagcaaaatgtatttgcactgcagttagtattctacaacaacactaaatctcaaccatgaaaatgattttatttaattctaccacgcacattatccacaattaacaattaatactaacaagcactaatctttcagcgtcgtagtctacccaacattttattaacaacagtatcgatcaatctatatgtgatcctcttccatcacgatgaactaatactataagttcaaaccaatcgaacgatataattaacttgaacaaacatatgttataattctaattaattaatcaagcaatttcaaactcaaatttctttaaagatcaaagaagaaaggatcattataatcccataaactaccagtgtagtcatcctcgttcgccatggaccaaaaaggcgaagaagatccaagccccactgtcccaaccaacgccagatccggatccaccgaagaagcatccatagtagacgcaaccgaacccacaacgggggaattattcactccctccaccaccaccatattctgatgttgctgttgctgttgattcgacaaaaccccatgttgcacttgcacatgcacatgattattattactatccagaaaaccatgcctttggtacgaggttgatctaatagaaccatcaacaacaacaacattattattcccacctaaacccacatcggattccgaattatgttggtacgatgttgatagagtatgtgccacttgcccttgcaccacttcctcaggacaacgatggtgatgaggatgatgaacttgcactatattattattgtgattatcattagggcacagaaccggtggggtgtaagtgtaattgtgactattgttataagggtaaggcacggtggcggtggcggtggcggtgttaaatggaaaattgaaagaaaaacctgaagggcgaggaagcaagggtcttagggtttgggtggaagaggaagaggagcgagaagaggaagattgagaagaggaaccggagggttggaggttaagctgtgccctggaaccgtaaaggatgatggcggcgcggtcgtaggctctggcggcgtcttcggcggtggagaaggttccgagccacttgcgcgttcgcttgcgtggctcgcggatctcggcgacccatttgccccagcttcgttgtctgacgccgcggtacctaaatttgttgttgtcggggccacctttacctttgcacttacgactactgcttttgttgttggtgttactgttagatgtttcgctgggagtggtttctgtggtggtggtggcggtgggtttggtttcttggggttgaggttggagagaggccattggttggttgggtccagtttggtttataattatctgaattagattagtgggggaaagatggatggagacgcttgttgttgggaagctcgttgttgagtcagtgttgatgttgattaggctctggtgggaaggggtttcgatgtcatctctgtcaatggtggaattgggcggtgtaacatgcaatttatacaggagagagaaaaaagaagaagggattggtgctgtgcatcgaatagagtaccacaatagtattggtttcggaatttggaatccctgcttctgcttcttgcttttgttgattttcttcgttttgtttcgagactagggttatggtgtttattgcttgggataagttaattaaattaattacttcctgtgctgtttactgaaaatttattattcctactttcccagacaactaaactaattattgcactgccacctaaggatttttatttctattgtgccttgcatttgcatcaagaaaaatacactcagtaatttttttaaacacgagtactaagctacttcgtttgtttaaatatagggagtattaatctttatcacctcttgttgcatatattggcaaattaactagtagtatcacacaagtttaattttactaattaaaataagggctacaaaataaaaaccttgtagggtgggaaatggcacaactgtcattttcatttttttaaacaaatggctagatattggtcccagtaggcaaccatgttccttttgttggtgttcaggagatttagttgatggtatctaacgtattttatggtaatactacttgacataaacatattccagccacccttattttagtcacacatattgcattggattatgtggtagttaaatgtttctaattaatgtcggaagtttattcttcaaaagctagtcataattgctggataaagtacacacatccatccataagcgccaccttcattgaactggcgcgcgcgatatatatatatatatatatatatatacacatatatatatatatatatatatatatatattatggtttagctattttaaaccttttggggttgaaaaaaaattcggttctttgtttggctcatcttccatgatgatgaactcccaagtcacaacctaattaatacgtactatatatacgccacgaaagacaattaacttctagtccctcttgcaacttgagtgcacatgccattcaagatgcatcatattgtctgtgtaattgcacaaaagcttgtcattttttgggaatggctggattttcttaccaagctgattttgttgctttagacatcaaaagctggcttcaccccttcagttacggcatcaatacaaccttgtccgtcttgtcttgttatatatatggtggatttgtatgcttccatatttgatatgatcactgaattagtacgtttgatgtattagaataaatccaattataatggtcgtaaacatctctcatgtgatgatgtgattagagaaagcatgcatttcgctagtactagtactagtcatttaattacttcattttttcttgaaaagatccttaattaattataattcacaattaatggtcatggcctctaaatctttgaggtttttgaatcaaatgaatatatagtttattccaccacatgattttttaaatttctctcgtcatttttcctcgtttgattagtagttaccataactcttgtaacataatcattggtagattcaaaattcttatgtgcaaagattcaatcacacatttcaggtttaatttgaagacacattttcaccttaattattaactcctttattatgaacattttgaagaatctcctaagtttaattatttttcccttattgcactaaaaaatttcttaagcatgcatgccatcatctagagtcgcatgaataatgcaaagaacatagatccattcgtaattcttttacaaagtgattcttcaggcttgatccaatactcttgttgggaatatttgtcaaattctcgtatccttattccacgtaccatgcatccttcacacataatgaaagtcaagtataccttcacatgaacacatatattatgaaagttatctaacttgactcatagtttaaattggttataaaaatgttgtctcattttttaaaattaatttattttcttatttttttggctttgttatcgtgaatattttttttgtattcatattgttctaattctttcttgtatttctttcatttttttattttttaaataagtgagttagcttgtgaatctacccaccaaacttaccaacctttagtgaattaaattattatatttttcactcactaaagaagtgagattgaattagtttgacttactttttatgtaaccctgtgagttaacacaagtaagtcaaattctattactttttatctccgagagtacttcattttttaataacgtcacttttcattttacatattattctctcttttatgaagtttcttatgaatgtctttgtactgcctttagtaacaacaaattttttttaaaaaatcaatcttgataattaattttaaataattaaaaataaaactttttattgataaatatttattataaaagcttacaaaaagtatagccactcttcttaatgtaaatttttgttttcagttactgaaaatatcctaaatactgaataaaacacacacacacacacaacgatttgatgattcctttaacttcattttggtctcgttttttactagaattttttaacatctattataacttgtaaacttgtgcattaaatcttttatcccagttgcactgatttagttcgtttgggaacagtttagaaaagatgaacgatgttatcagaatatttgtaagaattaggagttatactattacagaaatttcttattgttgggacaacgatttatagaagtttttttttttttttttttttttttttttttnnnnnnnnnnnnnnnnnnnnnnnnnnnnnnnnnnnnnnnnnnnnnnnnnnnnnnnnnnnnnnnnnnnnnnnnnnnttttttttttgtttttcaaatagaagttgtctttaaggttgatggatgtgatactgtagtgtatagggcccacaagtaaagctaagcccaagacggtccaagatgaggttagttatatgggctcagatgaggtccaaaaataaaaaaagctgcttccccttttcctttgcgaattgcggccggctttgcatcttcaacttagcaacaaaaagagatttagaatgtccaaattatccaatcaaaaatttaatcatgtgatgagtttgttaactttaataaaaaaatattttaattaaaaattatacacttatacttataatgaaaatttatggtaattatattataagcatgaagtatttattaaattttttatttcagaaataactttgtgttataaagttaatttttatttaaaaatttgattgatcgtttttcatgaaatcttctgtcttaactatattttgttttatttacaaaactcaatcttaagattttattcaagaaattaaaacccatttttttgttagtatatacttgtactaaccatacacaaaaattactctaaaataatgctcaagaggtgcttaagcgcttagaagagaatactaaatgtatatcaaatattaattttatattatgttttaatgtaactggcaagtaataaaatacttaatagatatcacatctaatattgtttttcttgtttactgctaaccaagttgcaaaaatatagattaagagagagaaagtattcaatttttnnnnnnnnnnnnnnnnnnnnnnnnnnnnnnnnnnnnnnnnnnnnnnnnnnnnnnnnnnnnnnnnnnnnnnnnnnnnnnnnnnnnnnnnnnnnnnnnnnnnnnnnnnnnnnnnnnnnnnnnnnnnnnnnnnnnnnnnnnnnnnnnnnnnnnnnnnnnnnnnnnnnnnnnnnnnnnnnnnnnnnnnnnnnnnnnnnnnnnnnnnnnnnnnnnnnnnnnnnnnnnnnnnnnnnnnnnnnnnnnnnnnnnnnnnnnnnnnnnnnnnnnnnnnnnnnnnnnnnnnnnnnnnnnnnnnnnnnnnnnnnnnnnnnnnnnnnnnnnnnnnnnnnnnnnnnnnnnnnnnnnnnnnnnnnnnnnnnnnnnnnnnnnnnnnnnnnnnnnnnnnnnnnnnnnnnnnnnnnnnnnnnnnnnnntattgtaaaatgcaaatatatatttgagaaagcgtgaacattaatattgattaacatgaatattaataattaaaaagaatagagttgattaaaagtatcatatataacttgattaattaaaaatattaacaataatctaattttaactataaaactttacaacttcaaaaaaataaatataaacattacaaataaaattatttaatttaattgaataatattttttaattttagttgtaaaatatgatgaacatggaatgcagatatgaacagaattaaatagtacataaatttatgaataaatattcggatctaaactctctgaaaaagtaagatgttttttaccatagatattttttaatgtgtatccgattctcattcttataaatatactgcttggtaatctgtcgtttatcatggtctgtacttggactcttcttgtattttttcggcattagcactgattctgcccttaccctatatatatatatacatacatatatgatcttctttttgcatagcttagtaatatattattgtccataatcttgagaacaaaaccttcaaatcagcgttacacagccccgtgggggatatagctagctaggttccttcaaaatgggaacaaagggatatgtaaatatagtttcttattaataaattaaatagatactataaattttagtgtccatctatatattgatcttgtgtctttgcttttatgaaaagacgtgatgggcatgcagcaagcaggacaaaagaggcagccaaagcaacaaggaatcagataatagtgcaagcaaatttaccaaattttgcatgcagatatccatgcatatccatcaagaaacaaagttaacaagattttgattacttttttgataagccctaccctatagtcttttaatattaattaacaacactttaatttaaagcctttagatagatgcacatcatcttaattaatctcgaactggatccaagtggggggaggagaggtcctatcgcctcccctatactttattcattaataaaaaaatgttattaaaaaatcttttttcctattgtacgattctaatccctgaacacagactttttttaattttaatttattttacctcctctagtgtactattacgctaattgagaaccatatgcatctctatctctgcactggccatatttttgtcttgtgtggaagaaggagaccacgttagagagaatctgcacgagaattaattggccggtgataattgggaatttgactaaggtaaagactgtggatgtgtccttgtcaacgtcatgccgggtaatatactacatgccatgtatgggacatctgaaatagccaagcttatttaattttttatatataataatagggcatataagagaactcatgctaaccatgtataggaataaacttaagatatcttgcaaagaaagttagagagaaaaaagaaatgcaagaagcttttgattagcactgaattagcttacgagtgtttgttattatagttggttatatagttagttataagaataactaatgttacggatgaaagtaagtttgttatcctcttgtttgaagtagtcaaacacccgctactggcccacgataaccacccaggaaggtgggatatggccgttatcccccacgagccaatatctccgcatatataggaacgatacgttggcttcaaccgcttgattaacaaaatccaggtatcctataaatacatcacaattcatggtgaaaggtacacattactctgaactctctcttttcacttcacactagcacacaccgcaccccccattgtgccgtgttactccgtgtgatcttcttcctcgagttgcttcatctgcataagcttcttgagagagagagttgatcctacataaaatcatccaacatcattgttggacatttctgttctctttgagcagaacaactaacttacaattaactaagctaattctagttacaatatggtcaagttgaaatgatcatgatcaagtctatgctaaaagtctccttcaagttaggaatgaatgttggacatttctagcttggaatgtaaaaactgaaaagcactaggcataagagctttggtgtagatatttgcaagctggtttgcaagggaaacatgaagtaatttctcaagttcttcgagcatattctcacgaactatgtgacaatcaatctcaatatgtttcgttctctcatgaaaaatcggtttgacaactatgtggacaacagatacgttgtcacaatacaaaacaacatggtgctgaaaatggatattgaactcttatagcagaaaagtaagtcattgcaactcacaattgacacttgctaatgctctatactcagcctctgaagaacttctgaacacagtggcctttttctttgacttccataagatcaaggaactaccaaggtatatggcataaccactgatagaccttttagtgttaatgcaaccaccccaatctgaatcgctaaagcctttcaagtgattgctactgttagcagaaaggaaaatccctgcacttggagatcctttgatgtatctaaggattcaggatgtagcttgttgatgagctaaggtaggttcagccacaaactgactcaaatgttgaacaacatatatgtaatgtctggccttgtgttagtcagataaatcaatcttccaattaatcttctgtaagaagaagcatcctctgttgaaagaggagaaccataatgttggtgcagcttggtgttggaattagagggagtagacactagcttagaaccaagcatgccaatgtcactcagaatatccaaagcatactttctttgacatagattcatgccagtaggtgttctaactactttaaaacccagaaagaactttagatcacctagtcctttattttaaaagcactgtctaatatatgtgtaatacttcgaatctcagccaaatcattttctgacaatacaatatcatccacatagaccagtaaagaagtaatggaattggaactatgcttgagaaacaaagaataataagattcacacagtttgtagccatgtgaaatcagaaaagaggatagtttggcataccattgcctacttgcttgtttcatgccatacaaagacctttagagttacaaacttgtcttggcttgtctgactgcataccttgaggaagaaggccattgattaacagtagctaaagtcagtaaaagtctaactgtagttaacttagccactagagaaaaaatatctagatactcttgaccttctacttgagtgtaacctcgagctactagccttgccttatatctcatatccatcagaattgtgtttgatcttatatacccacttacatccaatggcagctctgtgaggtgaacgatcagtaagaatccatgtattattgtgctccaatgcgttaatctcagcattcatggcttcaatccaataggatctttagaggcttcattgtatgacttaggttcaacttgttgtgggaaagataggataaaacaatgatcagaaagagacagtctgttgtaggaaagaacacaattgaaagggtaaaggctagtacctgtagagtgactagcaatagttgatgatgaatatgtgatgtgaaagtctttatattttcttggtctgtgtatctgtctcatggatcttctagatgtatgagtggctttttgagaaatagaaggatcaggattagtaacactgggttcaacaacaatatgatcaatggatggttctgaaggagggtcatcaaactgatcaatagtatcattgaaagaagaagttagtacaggtaagaaggtgatgagatcatgtttatcctgagcagtgaatgggaagcaatccttatagaaaataacatttatggaaacagaaatagccatggttttaaggtcaagagtgatatatcctttggtgtttggcttgaaacccagaaaaacagaagtagcagctctttgatcaagtttctttttgttggcaattagattactagagaagcataaacaaccaaagactcttaaagaaccaatatcataagaagtcctatataggttttcatagggagttttattgccaagaaaaggagttcatatgcaatttacaagaacaatagagtgaattagagcataagaccaaaaaatagagggtaaatttgattgaaacaataaggatcgagctacatttaataaatgttggtgctttctctcaacaatcccattttgttggggagtttcaacacatcaagtttgatgtataattgtctcataatgaattatgatccattatcagatctaatcattttcacttttgtattaaattgtctttcaacagtgacaacaaagttctttaaatgagattgggtttcagtttttgaatgaataagaaaaatccaaacaaaccttgaatgatcatttactatagtaaggaaatatttatgatcatttaaagaagtcacattgcaaggaccacaaatatcaacatatatgagagcaaaagggttggaagaataaaaatcactgccagaaaatgacaactttttctattttgaatgatgacaagtatcacgtacaaattatttatcagatgtaactatgtaagaagaggtatgattgctttaaaaatagcaacctttcaaaagatgggtggactaatctaaaatgccacaagtctataggcactttattacatgaaaaagttgaaatactagaagaaacataagttgtaatagaagtgggattatactccttgtgaggcttgagaggaagtatgttgagcttataaagatcttccaccatatcaactataccaatcctttgcgggttttgcatatcctgaataaaacatggtgctttggatttctgtcgtgttagtgaatagtgaaggtcatcgacgtggtggtgggtggtgccgatgaggaaaggagaagagatcagaatcaaattttggggaaaaaaactaccattaatggcaatacaactttatcatacaaaaatataaacatcaagcttgcccgacattaacaacggagaagggaggttaggggtggtggtggtgggagtttccggcgaagccaaaacagaagagaagagcacgcttgcatggaaggagattaaaaataaaaaatagagtcaagacatataaatattaaattattattattattatatttaattaacctactaacatgttataacaagttaaaatcacttccataccagtgaacatgtatttttcaacctcactttagaattcacccttttctaagcttgtgcaatatctaagcacatattataatccttcgaatatctcaaacgaaagaaggtaatataaaacatatatgtttagaagagataaagataaaaaccatccgaagaccccactccctaaactgttctcaattatgtggatccatgaaactataatttgtcttacttcggggttagcgaaaaaaatatgcaacaagtaggtaaacacatactatatttaatttaagttctattagatttcataaagaagtaaatagaaaatccctttgaaaattattgtattttaacacgaacagtgtgttttaaattagaaaaagtaacatgatgaaatttctatttgactgtgactccatcaataatatgtgtatgccacatgtatacatgcgtaaccaaacctaacatgatgtatttattatatgggcaatgctttgaacttttatccgtgccaatatatcctcccagtgagtgcttttcacctattgccttttaatacttttcttcataaaaattctgccaggtatagctagcctatggcgacacaaactggacagaatgaccgacaggccggtgaagcaaactactgcctcaacctcatctccaattcacagttcacaaacacgacaccacaaaaataaaatcagtaaattttgtatatgttaattatatttttactaattttatactgtacaagtatatataaccaatgtaaaaacgatgtaataaaccctccaagtttaatacgaaattcctcacaccacataatatattaataaaataataaacggtctagatttttcacagattattggaagagtctttttttttttaaatttacttttgatttatttttgcaatttcgttgccgcgttaccggtcatcgttaactcactgttgaccgcgttgggattgacggcaagactcaccatgtcaccgttggagacgtcgatgacgattccaatgtcagagtcaccgccattatcgacgccgcggtccgagttcacgcgcctcttcaacatcagcaattcatcaatcatatttgcagtatcttcagtcactgaaaaaacacgtggactcggagatcctgtgcgagtgactcagttcgacggaggagctgagttcggagtaaagcggcatgctccgcatggtgctgtcgaggaggttgatgccgatgttgagaatcccttgagggcggtccaagggacgacgaatatggagggcgacgaagcggagcttgggtttgtggttgggagggaggaggttggcgacgaggtcggcgacggtgccgatgaggacatggcggagccaggcatgggagtagatctcgttccaggtgggattggtgtggccttcttggcacaaccagtttccagttgctgatgcatcatcaaattttaatccaatgcatcatcaaatttccagttgcgctattctccgaccaccaatccatgcccaagatctccgccgtgcgcaacacaggtggtggcatggggtacaaccccttcgcgattgccgtcgccgtgggagattgaggtggtgggtgggtggtaccggcgtggtggtggatggtgccggcatggtggtagttggtgcaggagagagaaaggaggagaagagcgccaaaggaaggagaaggagaataaaaaaaaattaaaatgattttattttacttattatattttttcttcctgttattaacttattattatctgtcaattttgagattcaccgatgcagtccaaaaatggaacttcatattagacgacttggccgtaataaacagaatttgaaaactatttgtgcttggcgatgattgagattgagggagtaatagctatcagtccaacccaacagacaaaaaagctagcgggcacatctgttctacagtgtactacattaattgttttgatattcattttcttccataaagcgatgcccagagaatcttggccccttaatatcaagttcgtaaataaatgcatgaccacactcttctccgaacatctcgaatgctgcaattgattatactagagttgggcccctacatagtatttaggaattttaataagttttttcccccttcattcttaaaaacttagaactgtttaaaatagtgatcaattgaattcggatacttttaaagtatgtagttcaaaaaaaatataattaaaataaaacattattaacggtgatgaattaagttgtttaataaaaactaattatgaaaaaaaactgtttaaaacagttatttatataaactataattattactgttactacaatatttactccaatgataaaagtcgatgagaattgcttcttaagttttgagaacccacgagaaattcacctgttcttatattccttataaatatcatccatttgtagcttcactcgtactcgcactcacactagcacgcttctgaattctttcactccacaaagtatatgcatctcaacacaaccatcttaaacttctcctcccaaagcccaacttgcaaaaattacataaattccttgcccaaaaaacttgatcagtgaacaaacatgggaagttccgtgtgcgtaaaagaagcatcagtgattacaccttctgagcccactccatcaagtgtgttggctctatcagctcttgattcacaactcttccttcgttttaccatagagtatctgttggtctacaaccctttcccaggcctggaccaggctgccaccacggcccgtttaaaagccgcattagcccgagcgctggttctttattacccttttgcgggccgggtcagacccaggcccgatgggccgggcctggaggtggtgtgcggagcccaaggtgcggtgttcatagaagcatccgctgaccgttacaatgttcacgacttcgagaaagcgcctaaaacagttacgcactggaggtcgctcttgtcgctccacgtgacagacgttctcaaaggattgccgccgctggtggttcagctgacgtggctccgcgacggcggcgccgcactcggcgtcgggatcaaccactgcatctgcgacgggattggcagcgcggagtttctaaaccacttcggcgagttagccaacgagaaacgcgagttattattaggtctcaggcccatacaaaaacctgtctgggagcgtcaccttctgaacccgccgcgtgggaagcagacactggttgactcaacgagtcaccccgagttcaaccgagtcgctgatttatgcaacttcatgaacaaggtctcgacggggcttaaaccgacatcggtgaccttcgacaagaggagactcaacgagctgaagcgactcgcgcgttgcacgagtcaaccaggcgagtcggtgtgttacacgtcgttcgaggtgcttgcggcgcacgtgtggagaagctgggcgagagcaataaggtttccgccgaaccagaagctgaagctggcgttcagtgtaaacgtgcggaaccgagttaaaccgggtttgccggaggggtattatgggaacgcgtttgttttggggtgtgcggagacgagtgcaaaggagttggaggaaagagggatagggttcgggtcgggtttggtgaagcaggcgaaggagagagtggggaacgagcacgtgaggggcgtgatggagttggtgtgggagagaaaagcgtgccctgacccggttggggtgttgatagtgtcgcagtggtctcggttagggttggagaagattgacgtgggtatggggaaggttgttcacgtgggacccgtgtgctgcgataggtactgtttgtttttgccggtgagggatgagtgtgtaagtgtcaaggtcatggtggctgtccccactcacgccgttgacaattaccagcttttcatgcgcgcgtcgcacctgtgacttgtgacgtaaatggtttttttctccctggaagaaccgaagatagcctgagaaaatttataataattataacttaggtattttgcttaattaatcgaatttaacttttcacgataaatgtctgaaatgccccactcactcattcccacacttctcacaagtgtgttttgtcctactttttgtagcttttgagttttgacccaaaatctaacttattaatcacggtaaatcggtaattttcgtacactgtttggttagacaacaatcatgattttcttaaatgtaagttatttacgatgtgtatcaagttttacatgtgtgtcaagtttttttattaaagaattgattatgagtttaaaattaattttagataatttttttatatttgattttatgtggtggaagaagacttataattaattttggattgaatcaacttttactagttttttttattgaattcaaaattttgtattaaattttaattttaacttaattttatgataaaaacatttatacataaattatattgttttaaaatcaattttattaaaaattaattttgacaatctacattcaaatacacagagaattgggatcgaatttagattaaatgcgctgaatggttatggttgaggttttacgaataagaatcgagattggtagtgtgtttgcattttgcaaaatgatgaaatgcccaccatggcctatctcacatggtggaccatgaggcgctgtggcaacgaaccaagtggcacaagctctatcgatcatgtagtacagggaggaacatgatctcccattttctaatgatgtaatgcaaggatgcgcctttagtagctttcaatgcaatcactacgacactacttctctatctatatgagagtcttaataattagtaaagaaattaaggataatcaaattttatttacataatgcaatctgtgcctacgctatattatactatgtaattatgtatagcataattttcttagtctagctaacatctgtaattttagtcaatgtatcctcttgttacttagttgactaaatctattatgtgttcacgagtgatgagtttaattgaagcatctgaagtaatttgaaacattcagataacatactacaaacgttgcaataaaaaataaaataaaataaaggaatgtagatagaagtgagaagctacaatttggcattttagcatttaataattttagacttattagtgatcacgtaacaataaaagataaagattgtgtctgatactattcttcctgcaatattaatatatgtttgacatgcatgtgatggagagatttaaaatttagtagcacagaacgttatgcatgctcacgataaacttctgtccattggcaccataagtttattttggttcttggccttgctggcttattctggttgttcagttaccaaaccatgtttttgtgggtaggcaccccttgacccttgtgccatcttaatatatgattctttttttggctgatgaaaaaaaaaaaacttctgtccatttttaagagaatgaagtgtatatttataagaactctagagaatgtatatatcatttttggaagagaatatgcattgacaattgttgtactttaattgaagagtgattcctataaatcatgttgtgttaaacttcctcagaaacaacatgattggcattcgttttgatgggttattgacttttcaaaatttatgattgaactttgacggctatagtaattttaattgtctatcataaagaataatacttgtaataagtaccaaattgaatattaaaataattcagtgattgaatataaataattaatatattaaaattaagattaaattatttatatcatatttgaatttgatttttaacaaaaagtagtcagaattacattctgacaatgaatcagagcgttaacacagaaaattgacaaggagaattgacactctcgttattaaagtatgctagtagcagtatcttgtagaaatttactccttaaaggcccaaatttctcccgcagcgcgcataattttcagcaaccatgcacgggattgagaactgtgataactgttgacaatatttcaaaggttagattttccggatctgctgttccatgacaagaatctttgacctagaaaggctgacgagggagccaaccgaaggggcattacgctaacttatgctgattaaacggcatattttgagggaaccataaaatagtaagttgattttgctattacaagacaattttagtattttggccaagaatatcctttttccctctgcctaattttttccatcatctaaaattattgatatccaaatactattattaaacatttatgcaatattggaatgagtgaaatgagatgatattaaacataataaaattcgctaggtagataggaatctattaaaataaaaactccattccgtgttatttaaatattttatgatggattggaagaaagtttttatttcattttttagtactgaatagaatgaaataaattagaatttttttatacatgatcagtataattttatttacactatcagttaattataaattattttaaatataatttttaaaataattattataaaaattaacaatatgtaattatatgataatctataagtaaataacaatgtaaaatactttataattagttgtatattctgattaagatatttttatattacccttattttaacaggactaatatcaatgcaatgtgatatcctccttcattctatcccttctcgatctaaccaggcccggccctggggcagggccagcagggcctccgcccagggtccaaaattttttgggtcggtaatttaagtaaaattttttattaaaaaaaataaaataaaaacaaaacctatgttaggggtccattttgtgtattaggggactattttttccatctcttaattttaatattatttgtatttcaaaaaatttgtgtattagaaacccattttttttatcccttagttttaatattatttgtatttcaaaaaatttatgtgtcagggacccattttttccatccgttagttttaatattatttgtatttcaaaaaatttgtatgttagggatccattttttgtgtgttagaggctcattttttcatccctaattttaatattatttgtatttcaaaaaaattgtgtgttaagggcccattttttccatctcttagttttaatattatttgtatttcaaaaaatttgtgtgttaagggtccattttttttatcccttagttttaatattatttatatttcaaaaaaatgtgtggtaggggtccattttttccacctcaccccggatcaaagaattttcaggaccgaccctaaatctaccttttaaaaacacatgtttactttgctgtccgaactttggtcgcacaaatttcgtggtgcgtagatggagaggttagaaaggaaatgctttggttaacgtatgttggatatctctccaatgttaccccaaacatacccaaagttttaaatatcccttctttgatcccaaattatcattcaatgaatcagtttctttctttctcataactaaacttcctgctgaatcgaacatataaagatgagtgaatcgacaagaaaactcaaaaaataattgaaatcagcaacatgatatagaaaagtaaaaaatctaaaaaatatatataccacttaacaggaaaactaatacttaattaattataacttatcaccatggctttcatgggcttttgcttagaaaatgagaaaaaaccaaaacagaaatgccataatgaatggaaactaagaagttcagtaacgatatcactttccgtatttgcaacatatattggtctatttgcaacaatatatattgggctattcatgggttgcatcatatagattggactatcgtaatgatttgttgggctaaaccttcgtgcacttttcatttcattctaaaaaattcgttttaaaattcataatcagctaaataatttaggtcctctaatttatttttaatgatcaattaggtcttctaattattaaattattcaaaacggtttaatttagttctttttgtcaattaaatattaacgttaacattacaatctaatgtgtcaaatgatgtggcatttttttaatagatgatctgtcgacaatgcttatatttaatcagtttaaataattaaaggatctaattgaatcatttaataattaaataatctaattaaacattgaaaataaattagaacacctaaacaataatttaatcttcataattatattttagaatgagctttttgaaatacaatggtaagtataagagtaatagtgggagtgcaggaaacaacagttaccaactcaagtaggatttgaacacaaaatcatttcattaccttgaaagaaatcgtgaacgggtgattgtcttttgcaactctttttctcaaaacaccctctatcactttttatttttatattccaaattctgaaatgtataaaataatttaggttaattaagtttttagtcttttaacttttttatattctaatttgtaatccctcaattttttttgataacttttagttctttattaatttttggtccttcaaatttttttttgcccatttttagtccgttaatgtaaaaattaatttctagaatgtaaaaaaaaaatgtattaaagaaaaacgggtgcgaaaagaagccccagtgatataaatggattgtctttttcatttaggaaattgattgagctgggttcagagtttctgatgtttcttatcgggccgtttgatagcactgtataagattgaaaattgacatttacatcacattttatgttaagttcacaccccacgattgtgtattttctttttatacaaaaatacctgacaaataatttttttaggagaaacagaaatactttttgttaagacaaatacagaacgaaaacatattttcatttcatcataaggtgtgcaagcataacatataaaatggaaacacataaattttctatttcttttattgaatttagcttctatatattgtaagtattaaactttttatataattaatttatcagaaattatgataagtaaaatatttaagataattatttttaaaattaataagataatcatattcaaatttacatacactatatactcctttcatttcccatgaatcacatgtatccttacataaaaaaaatcccaggactacgtactacatacactatctttaatcttggacaatagtcaacttaattattcctaagatttgataggattaacatagtaactgagatgtaatgcactaatgcatggttgcttgttgcccttttagtacgtatgggtgaacatgaattggatttttaagaatccaatccatagtcaatctatatttatttaaatgaattgaattttaaatatatatccatattttttaaaataatttgaattcaagatccaattcatttaagtggatatagatttggtcatatccaatctatatccacttaaatgttataaggatttatttttacaaattataataattaaacactaaaaagtgaaaacttagcacttgttcatttaaaatcaattttcaaccgaatttgatcgagattattttcgatcaatcttggttaagatattttcagcctatctcaaccagggcaattttggctaactaatagtcaaaacatttttagaccgacatcaaccaatactattttttggctggtgttggtcaatgcattttcggtggacatcgatcaaggatgtttttggtcaatcttaggtaagattattttttggttgaggttagctatgatttttagttaatgtcgattggtgatatattttgaccgacatcgactaggagtttttcgatcagcgtcaaccatgactattttttgaccgacattggttaaggtttttgtgggcgacatcggtaaagtgtttttgactgatgtcggttgttgatatttttttgccatcaaccagaattattttttggtcaacattggctatgtttttttgctggttgaaactatttttttgttggcgtcaactaggatttattggccaacattgaccatgactatttcttttggttgatgttgactagagatttttttttgttgacatcaactaggttttttcgataaacttttcaatgatgtttttctgccaatgtcggccaaaaatgtcctagccaaagctggaaaaaaaatagtctcatttgacatcgaccaaaaaataattccgacagacatcaacaaaaaaactttagctaaagtcgaccaaaacatagtttcgattgttatcggccaaaaaaactttggatgacattggcaaacaaatagtcccgaccaactttggcagaaaatccttaccgacattaatcgaaaaaaagtctcaatcgatgatggcttaaaaacatcatgagttgacgtcggttaaaattattctagatgacatcgaccaaaaaatagttcctaccgaagttggccaaaaaaacttagccatcaccgtccaaaaaatattattagatttaaaaatctaaataaatatctaatccatatccaattaattgaattgaatttaaaattaaaaaattggatttagatatgaaactagaacatttaaatggattaaattaaattgaatatgaattaattttatatatttgaatttttttgacagtgcttcgatgcttgtatattcatctgtaccatgcgatggtatataaatgaaacttgattgatcgaaaatttaaatgttgaaccttaatttccaatgtttgtaattcgctcaatcagacctgttaagggatgtcaagttagaagtcaaattatgtattgatctgaaatggtttgcaaaattttattttctagatttttttcatacgtgggatgatgaagatcaactgggaatatttatacttttcaatcatactaatgctattagactgagtctgaggctaggtagtgttggacaacttctttttagtttttagtttaaacaaaatcctaaaaagtttatgaagaacaaaagtaattttgtaatataaagaaaatataaaaattaagctttacatgaagtcatgaactaattttattagtagtttcccgtgtcattgttccaggactcaataatatattatccaattatatattttttaaatcacatatatgttttacgaaaattaatcctaatctaggaggatgtaattactataagtaatttattttccttttatgtatttaacagagttgttgcatgtattcaaaaatagaaagattgccaattaagcaataatggggactccatctccgcatcaagtcaaacaggttcagattccaatttacaaagggcgagatgaaaaaatggaacttgacccaacccatcccatgctcccacatccccaagttagggaaaatacgatcaaagtaattttttcttgtcagactttggacaggatccgacggatgtccacatgtttaatttttattgccacgtgtaaacaataacattgatccacttgttctgtagtatcccaaaatattaaaattactaaatagttttaacctcaatttaaaaaattctaattctaatttgaaagtaattttaattaagatccacaaaagtcaagataaacgtcaccttaatgtcggcaatagcttattaatgtcgacaatttggggacagatgatttgaatccatcaacaacgaccttaacgatgaaataaattaatataaggcaagttcatccatattggtttgtggtgtattaatgtatgagacggttaacgtaacttgaataaatgtcgagcgttatcttttgggtcatggcttgtaaggaactacactgttgtgccatatacggcaaagaaaaaactgttgaagctttacggtattggcattagtctttggattcctatgacatgacacggttaagcttatatatggaccatggtggtggggttggtgcgtgactctgaaaatcacaacgggtgctccgtgcgttgcaataaacagtacggttaattagacccacttcagagggatttgcaagaatcaaagtagctatagtagtgttgctgtctctatactaaatggtgtctcacacatgttggtggtgccattcaatactcaggttcatctggtccactgtctacatcacaaataggttatctgaattcacaatcagggtctttgttctttgttctttttcttttttttattaatattttttttgtttttgatggtggtggtggtgtctttactaagcaaacaacaccggaaagagataatcagaagaacatatatacatgcgtttggaaagcagagtttctttttggtcactgggtgatcaagagaagcatcatcatccgtgaaaatcctattataattattacataaatgaaattcaaaacacaaagaaaatcatcatttttcctataataatagcatggagaaaacttagctattgatccctttaggagtgtttttggtgttatttttcaatcagaattgaaattttacctcaataattttgcatcatgatttaatagaaacctttattacatgaattactaagattgaaattccaattctgacagaagaacaacaccgaaagcagccgtgcaacagtatatctaatttttgtcctagtagcataggaattatgaagctaaaagatttcaatgaagaccaattcattctagaaggtgcttgattatttatttgcatacacaacacagtcgctgcttttgatgattgatcagaaaattcagaacaattacaacgaaagagagggggggtgggtcataactaacaacatatctcaaaatatatatgggatttgaatgaaatcatccaccgtttcatgtctggtcaatgatgattgagacgaagaggtgtgacagaagttgtcattattgaaattatcagcacaagtgaaaaaatcagggaagggtggcaaactaacatggccattaatcaaggcatcagaagcggtggttgtagcagtagcagtagtagcagcagcagcataacgagcaagacggtccttagcaatggcaaggtcatgttgaagctccaccatcttcctttgcagcagagctatggcaccaatgcatccataaaccgggtcccgaagccgtgcttccgcctcataagcaagcgaattcaccgtgtcctctctctgttcctcaggaacctcaacgaggatcttgctcacattgcttgccccgaacaccttgtgcaccttggcgaatttcttgcactcgtcagagcgaaagtaaggtgcaaatatgcaattgggtatgcaccttctcttcaagaacttgcaagcggcacaagaagagcttgaacgtggctcataacccttcatggctctttcaattctctcaattttcactttactatagtgtttgcacttataagtatatggttctctcgataggtatcttgctcaatcgctatttaagggctaccacgtttccttgcctatgctcagctaggtagcaggttctggacttgcatgggtcaatgctgtctttttactgcatttattttatgttatttgcttttgataaaaaaatattatttaggttttctctagctagtatagtagtatatttaatttgccatctataccattcattcaaattgggagtgcaaaagtaggtccaaataattgattcatgtggacaatgggtggtatgagttggtagttttcaagtaagatatgatagttcatgaataaagatggccggggatattttgattgattgaagaaaagaaatattctcaataaaagcaaaattatcccttggcagtgagaggtatggtcactagaaggaaaccaataagatcgaattgagtactttagatgtagttggaatcttcaggtacagcatagtggagccaaaaataaagctagtgaattgttgtttttatgctttctatatcattcgatatttcgttttttccgttattatttttgcaattctagttgctttctaacaaactgaaacgggaagtttaaggtgaagaagctataggcctatagcacatggaaacaaactgagtgcgtgtcaaattttaaccacattaaactaaacatcttctggttggtcttgcatagtaacctaacatgggtttccttttcctttttcttttttttctaaaagaagaaacacaagggtgtgactgtgttaggggtgtattatttttttatataaaataaaccaaattagttacatattcttgctaattctatgggaattaaatatacaccatgcacatgcacatgaaaaatgtttttatgaaggaatttaaataaatatataaaaagaggctattctataaacatatataaaagcaaaaccaggagccaatcatgaactgattgatttccattcggcaagcaataagcccaaacctgactttattattagattaataattattcgatcaaggaatccataagattcaaaaattcaacttcataataaagattcaagagaaaaaatagagtgaccatttatgagggatccatacatgtattaacttttcattcagcctaactacatgaatccggacacactcctctcagtaatctagtaatcagactattacattcaatagattatctttaagtttatttattcaaatattattgataatattacaactatatttcaaataatatgtacttaattatatacaaaatacatattatctataaggtatgaattatctacaatctaattatctataacatataattattcattagtctttatctacgtgttaattatttacaaagatccaaggcccaagcttatgttataaatacaggtttcatttaacatttcattcatattcattcacacccaaatcaatcgaatacaaagttatttacttatcctactcatactcaattatacttttctctttataattgatgtatttatttgagaataagaatcatttcctttgttttacaaattctcattcttaacaaagttgactcatccaacatgcatagtctgaaattcatctgaaccacatttatctttatacataatacttccggtaagaaaaaaacatgatatactataaatttgatattgttttatctttaggaggccacctcacgctgaaattgatgtttacacagataaggattaaaacattaaaatattttatcattataactagataaagaagacattaaactgtattaagaaattccatattcgaaggttcaacctagtcgtagatgtcctataacgactttctatcattgcatattactgtgggggtgcaactgtaaagatttcctatctcattatggaatctaatataataattgtagattgcattgttaggtggactgatcatagcccagaatttggagggacttgcataatttggtgaaaccaatctcttggttctcagaccgtattttgacacaatttaaaattattaaaattagagtttatattttatgcattattaggataaaataattacgatgttaaccaataaaaatttatgaaaagtataaattttaaggtgattgttgttaaagtcaaaaaatttattgaacatattaattgatgattgaatgacaatattttttttatattgttaggtcatctctaatgttgttatttactagagttattttcaagttaagttgtttaatgtgattgttttagcataataacaaaaaaaaaattatcacaagataatatatattttttctaaataagttttgcatataataatcatagggttagattttagtcctcattataatatttaaaattttgtaaattagaaggaaagatgagtaaagtgtttatcaagtcaattaatttgaacttataaacaaattaacttaatcaaacatgattaaattttttgttaaaggaaggagtcaaagattttaagaataaagtttgataaacataagaaaaacttaaatcaatagattatgaacaaaccacataaacaaaacttgatatcataatttaatccaaaattttaagatttaaatttatggatcttattttcacttatgtgatattcaatcttcttattcttatttaatgtgagactcatctttatactcattctctaacattttagttaaacatgattaatttatatttcatttaaccttaaatcaagtcaattcatgaagattctgagggaaatcttgtaagctgtatcacatactgtttagaaagaaagaagggaaaaaaagataatgaaggtaactttgtttttgtgatctttttgattaggtgtgggagtgggacatgataaaatggggaagataagtgtcacctcaaactcaaagtcatggtggtagagaggggaaagggatggaagatgataatgcacccaacctccaatttctaagaccccaacccaagagcccacttgtttaatgcgcgtcgttttcccttaaaacaaacaatggacaatagggtgtggggggaaggaaccttccatgcaagccgttggatcaagatcgacggtgggtaacactcacgcgcaggagtggatcgcggaactacggataatagcttccgcaaaatgggccggcccaggaatgattggagatgaagatgagtcccacttccccctctctctttttttttttttttgttcattttaatgcacattaggagagaaaacaaatatgaattcatattttctgataccctgtaccatgctggacctagcttgactcggtcaaaagcttgtgagcggcaatgtatcatagtcccctctctattatttatatttgaggttcatttctaaattattattctcttttttaaagtaataaaattatataaacattctcaaatattataacgagtagtcctctaagtatttaaaaattatcaatttaaaacatatcaactcaaggattaaaatgatggatatttaatacttgaaggattatgtatataattttattactctaggaactaaataagagagagggtaatactaaattagttgtttattccttatttttctttggtatatatgtatatatatatgtgtgtgtttttttattatagaaattcttgtttaaattatataagattattataaataatatattttttaaaagatttaatgtaactacatatacaagactttaatataagataactaattaataannnnnnnnnnnnnnnnnnnnnnnnnnnnnnnnnnnnnnnnnnnnnnnnnnnnnnnnnnnnnnnnnnnnnnnnnnnnnnnnnnnnnnnnnnnnnnnnnnnnnnnnnnnnnnnnnnnnnnnnnnnnnnnnnnnnnnnnnnnnnnnnnnnnnnnnnnnnnnnnnnnnnnnnnnnnnnnnnnnnnnnnnnnnnnnnnnnnnnnnnnnnnnnnnnnnnnnnnnnnnnnnnnnnnnnnnnnnnnnnnnnnnnnnnnnnnnnnnnnnnnnnnnnnnnnnnnnnnnnnnnnnnnnnnnnnnnnnnnnnnnnnnnnnnnnnnnnnnnnnacactattaatcgacacgttagatgttaggcggtgtctctattattcattttgttttattgaaattgaataattcttttttagttataaaaaaaaaaggagatcaatctttctttaaagagaaaatcagaaaatatgttgattgggggaaggagcatctttctgttgtgttcaataagtgaaggaaaaacataacagccaaagacgaggtagggccgtaggggggtggtactaacccagacaaattaccgtttactataggtaggctgaatatctctcttgctacaaaaataatacagtgttgtgctgcttcttggttcagaaatcagaagtgctactactcgataaagtgaaaccagaaaaagtaaaaccaaatatgatgaactcattgactgcttaccaaatcaatgatatgcacaaactatatattgcgtctttttttttttttttctttagttaggaaagtgactgtcacacagtagtggagacattgtgcattgtttgaaattttcagtatagacataatattaaggtcttttcgttttgaaattagaaaaataattatcgtatttgtaataaaaaaaatatacgttttaatatatcttttcttctatattttttttttttgaaactgaactgtatctaattttaccttaatgttaaactgaatggtctcttattaaattaagaaaacacgaggaatttagttatgcgatatgtttggagcttctttaaaaaaataaaaaatgctgaaaggtatttttgccttttttgttgcaatgaaactatgaaaagttgatgagagatatgagaagaatgaaaagtgaaaacaggatgaagctattgggaatcattgagaattgaagtgaagtcaaaagcttgtaaaaggtgggtggtattgacattgttacttttagttcggctgactatggatgtggatcgaggcacctaggctttgaagttaaagtagccaatcctagtcaattgtaagccattggatactgaaatttcaaaggtaggcttgatccaaggaagttataggctaagacaagataacgaggaagcaattgttttatgcacccatttttgcttgatgaactcccaaaatttaatataaccccatcttacccttctctcctctcccattgcctactttcttatcctttccatcttcctcttgaccgcttcgtgccttcttgctttcgttactaatcccctatcccgcacctctacattgttggcacatccttctcatcctttagattcaggattcagagttatgatttcataattttggattgagtattctagaatgtattagtattctagaatactcaatccttaatacagacaaatgtattctaggagttagactcacttaccttactgaccatttatggtctccctatttcgactttgaattactttatcattcttcatcttgtcaacgagttctttataaatgatctttgatatgggcagtgacatcacttggactcaatgtcattcgtgtaaggattattgctataagcaatctgatccaatatttaatccattaaattcttcaacatatatgcaaaaaacttagaaatactctaggaggtaaacatttaatttttaaaacaacaaataagcttaatttatttcatttcccatggagcaagctaagatagtctcgatgacataagtccatgcgagtatgaagtccattatggcgacaaatcctttatcaagggcttctgtagcagtgatcgcctcaccctttactttgatcccatttatccctccaacaccattgacaacttctacttcgactgtggtgaaaataagagaggactctttgtccacattgctgacttttattcccttggtcgcgacaacctctcctttgtggatcatacctcgtcaaagtacaaggaaacattctcctactgcatccccaacaatgactatgtcggctttgtcacctttggcctcgacgttgcccgtgatgatgacttgaatacacccttttaatcaccgtcatcgcctgcctttcattttatggcctcgacatcaccatcgatggtaatatagtccttagccttgcctttcacgaaatcgagcacgatggattcatcatcgactttggcactgtgactacctgactctctcagacaatctatgccatgctctagttggcatactaacaatgcatgtccaattaccccaccgtcgacaagtatgacataatggatggaaagaacatggttggtaggagagaccccactaaaggtgatgagtcaggttctcgacggagattagtcatcagtaaaactggtggatactctgcaccaatatcatggtgataaaaaaaaagatgacaccacttataacagtttagactatttggaaaaaacacctaatgcaacaatttcctccatattcttcttctattagatatactaattaaacctttaaaaaatacttttactaacatccacttcaacagttccacttaactacacataaaaaaattgacaattattagttataataaatagaatacggtacaactgataaataattgattttatttaaaacattaatacatatttactcctatataaaaacttttttaatgatttttatgtttgaaaaaaaattaggccaactatatttcattttttctatgacccatatattgccaaatgaattaaaaaataaaataagattatacacacacacacacacacacacacacatatatatatatatatatatgtatatatatatatatataatcatgatcaaactaaataagaaaaagcataataattaacgtttttattatttcagaacaagatgttttcaatttatgcaacaaacgtttacacctttaaccaaactctgttcatccacacactacgatgaaagcatattctattacccgaaatatcatgcacaatctcaaggctttttctagacattcccaacatcaacatcaacaccaacatcaacaaaacctttaacccaaactaattggggtcgatggtagataaaccaaaatacgctaatttcttgtcaaattgattgggagcaaatgccaagcaatacctcgtctgattgacttggatgaatgtcacattctacaacaggtccatcatgacaccaaaaaacacaaacaccatttgggaattggaatttaaatccgctaagatcataatatgtgttcagtatttcgtgttcgcaagcagttggatagttggacatgcattgtcggtacgtcgattggagcatggcatagatggtttgggggagtcaggtgattgttggatatagggggagtaacaagaagatgaagcttgtgccttagaagaaagttttgagtttttcacatgccttgaagattgtaattcaaattaagtgtatgagagaccaatcttttgatccttgcattgcatgctcattaacatgcttacatgttttcattaaagtatcaaaactattcatgtattttaaagaaatctataagtaatgactaatgtttttggaaaaatgtaatcttattgctttaattgattacacatcggtttaatcgattatttgcttcgttttaaatctggaaaaaccttgaagaacatattaatcaattacataactcttgtaatcgattacatagtaaaaacaaaagcatgcctcactgctttaatcgattactgcaaattgtaatcgattacacaaagcttgccttacaatgaacttcactgctttaaccgattactacaaatcgtaatcgattacacaaagcttgctttacaataaaattcactgctttaatcgattacagctcggttaatcgattattctgtttgttgtaaaacccaggatgaggctttgagcactttaatcgattaagtgacaaatgaattgattacataagtcattttaattgattatttggcgtattgtaatcaattacagtctgttacaaaaagctattataaataggataaaggcttgtccgatttactaacttgaatacttcgaattttctgaatatacacaagtcttctcaaagttagaaagtaattttctaggttaactaagatcttgtcccactctttaatcttcatgggtattgaatgatttcttgggcaagagttttttaagaagttttggagagcatgttctgaaatccttttctgcaattcaactctgattggtaaaccacatgcattcatattcattggatcatcaagttgtttctctccattatctctggttgtaaattcgtttttgtattttttgttatttgaagttattgtaaagagttctttgaagcttgtgctagagtaggattctctagggaagaacatagtagtgttctctggttctagatcactaagagtctaatagagtttttagatttcttttctttgtctagggttgataaagagtgactgttgtaaagcttgtaagaactaaaatttgtaatagtggaactctaatctagtgatgattagaagaaactggatgtagcttctcttgagaagtgaaccagtataaattcttgtgttgattttcttttccttaatttctactagtcatcttgttcatttgttcttagtattattatcattactcaactagtcctgttttgagcaattgatttcttgagttgaatggtttgattgattagagacattcttggtttgaaagtgattaagatcttttaactctgattttataaataaattttaaaaagccaagtttaaaccaattcactcccctcttggttattgtgggtattcttattgttttcagtgaccacaatgttagagtcagtgattgagttgttatgctttgtttggtagaagtagatgccagggagtatatcaccgtcgatgtcgagattgtaaaatgagagaccatcgggagaggtcattaaaggggtgtagttgactccatcatcgagggaagcatcagggtcgggactaaaggtgatgtagtcgacatagtcattgttggggatgcagtaggagaaggtctcattgtactttgtgaaggcttgagacacaaaagagaggtccccgtgaccgaggcaaaaaatgccaacaaaatgcagccaaagtgtcctttgttattttcgtcgcagtcgaagtagaagtcgacgacaatttcaggggcaaaggtggggtcgaagtaaagggtgaggcaatcgctaccatataagtcctcgataaaggatcgatcaccattatgaacttggtacttgcatggacttatgtcatcaaaataagtgttccctattgcatgttaaaatgaagtcaattaagcagcttacccttttgaaataatgtgttagaaaattaatgtttatctcctggttggtttttgagtttttttgcacatctcactgaagcaatgagtaatgaagtatcatgagatggattaaatattagatcagattgctcatagcaataatccttacatggctcacattgggtccaggtgatatcacttcccatgtcaaataccatttgtaaagaactcattgacatgccaagacaaataacgagaatatagttaagagttgaaatagggagaccaagaatggtaggtaatgtacatgaatcatatttcttcaaatcggactgaatgtgcttcactcattcaaggtccttgatcaaaagtacattgtcattattacacttgacatgggagcatgacccatccatatggaccaaatgttgtttttcttctgatacttgaagtttaatagtaatagttagaaatgataataaaaataataatacatatactagtatttatttaagacatggtcgtgtagaccattaggcaattgaggcaatgacctaaggtcttcaatttttaaggcctcaagttttttttttcggttttcaataaataaattattattaatttaaattattaggtgataaattttgttataatatgatgtgttatttgctattattttaataattaagatttcaaatcttaagatatttagttgtaaatttagtattatttaaaaatttagaaaattattttacatctattttggattccatctctttctcaataaaaatgttattgaaattaatatatagtttaaatttaatgatgaatctatgattgatagagatatatgtgcacatgcgtgcatgttcatgtgcatgtgcgtgttttcattttgttttttaaaaacaaagatattaagtgaatgacataaaaaagtaatatactctattagtagtattaaattatattaaaagattttttttctttcaaaatcttacatttttaaaaaatattattgataatacttctaactattgtcattgttgaatttttgttttttaaaaaaaactaaaattattcaaatcttataaaagattaatgtatttttcactttatacattaagagtgaaatactttaattattaaaatacggtaaataattttgtagttgacaaaaaaattaaaaactaataaattataccaaattaatatttaaatgtaaattttgtcttagacttcacaatttatagacacaaccctaattgaagataagacttactaaattcaatcattttcaaccggagacatttgcaagtaagtgaaacatagaagaagtggaaagacaagaagtttaaagacaggaagaaaacaaaaattgtacaagaatacatctcttctccaatatcgcacacatatgttgtaatacaagcgaaggggaatgcccattaatatgggttatcttccttgtagttttttttgtcctcttccttgaacttatgaattaaatactcttataaaaaacacaatgtgtacattgtttactcccagccaagtctgattgcaaagaattatcaaagatccccaatgagataacctcaaagttaggggtgagcataaataatccacatgaaagttaggggtgagcataaataacccacatgaccgcaacccgcacaatctgacttgaaaataagctacttggatggatcagtttgggctttgggttaaaaagtgtaaaaaaatgattatttgagggttattctgacttgaaaatacccgtcattcaaaactttgtcatccattgatagttacacaataattagaataatttaacagaaaccaaacttgagtgatattatgttaaatgctaatgtaaggaaccaaggatatagtacttcaaggatgattctataaaaaatttagtctaaagggttacattgaaccttgacaattgacattgttctcccggggtcatgtacgtagacaaacatacttaaaaaattattggtaagtgaagtggtctctggtgcctaaaatattacctctctttgtcagacacagacatttatatagcagagcacattagcttcatttgtttgtgacaattaatgattatgattatgagaattataggcacaaagtatgacctacatagcaaaggaaccagccaaaacatacaaattttgctacagtgaaggagactttttaatctttcaaatttccagattttgttatagtgattagtagagccacttctttgttgatctgactcattggttttacgaccaatctaggattttctctatggttgttagtacttgctttacatggaattcaacaactactttgtcgtgtaatgtccatggtccaaacctaaaattgctaattacgatgttttttggcatttaatatatgatgcaaaaagaggaacaacaattgaattgaagcatgaaagttgaaacatattatagaggctgcaatattagatcctgcggcagagctacaaatgtgacatcagaaatgataagtggatggcaccatgatttagaatcagccattgaggttttcaggagtcataatttacatataatgcttaattttcctgaaatgacagatcaagaaaatcaaatattatgcatctggttcggggtgctgttggattctaatatcttcatatatcaaataacaagattggctgaccgtattcaaatttgtttgacaagcctaaagattttcgaaggtggacataccaagcagctgaaaactatgtttgacaaggctcattaacaaaaaaaatattcatgtttgaataaaaaattggctgaccgtattcaaatttgaataaaaaatttgctggggaataccaactaatcttgcaagctaggaaaatcctccaaatggcaacacccaagaaatactgaactctcttcaatacttttcttcttgtctttagcactaactgcacaaatagaaagagacaaaagtaccatgcatttaattaaacatctcacctctttgaaaaatattttaatgtaaaaaaatgccttatagaagctctcaattatccaattccttgaagggagcaaattttgtgaaccataagaatgaacagaaacatcctcctactaaggtaagaaccaaaatgaataatgttctatctgcgatgatggtctccccaggcttgttaccatcagggactttgctagattctttgattcatgtgtgcaatgaagttggcacaatggagaagttccccttggtacacacaaggaacgtttcatccatgataaggaggatcaagcttctttcttctttgtttgaagagattcaagaaacggatactccacttcccccctcttcaatactgtgtctcacagaactcttctctgtgataagaagagtcgaagttttgatccaagactgcaaggatggtagctctctttggagtctcatacagttagagttcatctccacccaattttatgtgcttgttaaggagatgggaagggcccttgatatccttcctttgagtttgcttaatgtaacatcagatattaaagaacaagtggagcttcttcacaagcaagcaaagagggctgcgttactcgttgatccgagagagcttcaccgaagagaacaacttatacaagtaatgagcaacaacagtttacaaaacaagaagagcaaggggttcgttgactttggcaaagtggaagagatattaagcagcattggtttgagaactccatcagattatgagggagaaatgtccaagttagaggctgaagctcagaaccaagccggcacaggaggactaattgttgtctccaatataaacaatctcatatctctggtgtcctattccaaatccatgatattcaaagatggagagagtgatagaaatgaagaagattgtaagcaactatcttcatttttgtataacaaagtatatgatagttcttcatcctctcagtccatgacacctaatgttcctgatgaatttcgttgtccaatttcacttgacttaatgagggaccccgtgattgtgtcatcagggcactcttatgatagaatctcaattgcacaatggataaactctggccattacacatgccccaaaagtgggcaaaggttaattcacacggctctaataccaaactatgcattgaagagccttgttcagcaatggtgccatgacaacaatgttccagtgaattgctgatttccagctgtacatggagtggccattaatggtttccagcctgttccagccgtccaccaattccagccatcaccagctgtccaccaacttccagctgtgtactagttgtctgccacaaattctccaacgtacaccattcttccccctataaatagaggtgcaaacctcacttgtaaatcatcaactagacacagagaaacaccaagagtgaattcatccaagtagtgagaattcttagtgagtgttgtgtcagtggtctgagtttgagagttgttttgttttttgagtttgtaaatctctgtaattctattcttgtgagtaatagaagctgtttttctctcaaattcgtgtgtaccaacacccaattgatccgttggcctcaacaagtggtatcagagccacgtttgaggtgttggtcgatttttcgtttttctgggttttctgagttttgcccgaaatccagttttgattgcaccattggattcgtctcgtcgaaccgagtccaacgcaacaaacggcgaattaatcggagttcaaacgagcccagaaatcgcggtcaaagtttggtcaactctgccggaagttgcagttcgtcgccggagaagacgaccggagttactgttcctcgctggaagttcgccggagaagacgaccggaattgctttttgcaccccttgacctgataagttcacccttactttttgcaccccctgttttgataagttcacccttatttttcgcacctcctattttttgataattttgaccctgaagtgtcaattttatcatttttaaccgttctggacgtaacggtaagctccattttgcaaaattcaaccttgttttggtaaattaagctactataaggtgataatgaccacagaagagtcaacatcatcttccggagccatgattatgcttactgctacaaattatacgctgtggagacctcggatggaagatctcctaagctgtaaagatttgttcgatcccatagaattgatgggtagaaatcctgactctgctaaggagttggagtggaagaaattaaatcgaaaaactattggtcagatccgtcaatggattgacaatagtgtcttccaccatgttgcacaggagacagacgcatacgccctctggaagaagttggaggacatgtaccaggccaagaccgctcggaataaagccctgttgatgaggcgtttagtcaacatgaagtgaaaaagtggaacttcagttgccgggcataccagtgagttccagagcttggtcaaccagttgtcgtctgtagagatgccacttagcgatgaagttcaggcgctattactactcagttcccttcccgatagttgggaaacgctggtagtatcactcagcaactcagcaccggatggcaaacttaccatgtctatggtaaaggatgctttattcaatgaagaggcaaggagaaatgacatgggcacagatcagacccatgcccttgtcacagaaaaccgggggaggcaacaaaggagtagtaaaagcaaatggagaggcagaagcaagagcaggggcagatccactgatggtagaaaaccaacatacaagtgccatcattgtggaattgaagggcatatgaagaagaactgctacaagtggaaggaagagcaagcccagagcagttcgcagccgaagaacaagggtggagaaacattagttactatccttggagatgtagctttttgttctacccataatgagacatgccttcacgtctcacgagaagacacagaatgggtggtagatactgcagcatcctaccacgtgactccccacaaggaatacttcacaacataccaagatggtgactttggagctgtgaagatgggaaattccagttcctctgggattgtaggaattggtgatgttctagtaaagacaagttctgggagcacaattaccttgaaggatgttcgccatgtgccagatcttcggttgaacctattgtcaggaatagctcttgacaaacagggctatgatagtcacttcagtaaaggcacatggaagttgtcaagaggcgctatgatagtcgcccgaggacatatttgtggcacactatacaagactcatgtgaagatatgcagtgacagccttaacgttgcagaaaatgaggcttcacaaaatttatggcatcagagactcggtcacatgagtgagaaagggttgtctaccctaataaagaaggagcttatcaatgtagacaaggatgctgcactagatccttgcaatcactgtctgtttggtaagcagcatagagtctcgtttaattcctcctcaacgagaagatcagagttactcagtctggtacactctgatgtttgcggtcccctagaggttgaatcactcggcggcaaccgatattttctaacattcattgatgatgcttctcgaaaagtgtgggtgtatttcttgcggacgaaagaccaggtattcgattacttcaaattgtttcatgtcatggtagaacgtgagacaggaaagaaattgaagtgtcttcgatccgacaatggaggtgaatactcttccaagcagttcaatgtctattgcagatcatatggcattcgacatgagaagacggtccctcacacccctcaacacaacggtatagctgaaagaatgaaccgaacaatcatggaacgtgttcggagcatgctcagtatggctaagctgccaaagccattctggggagaagcagtcaaagccgcctgttacttgattaaccgatctccatcagtaccattagattttgaagttccggagaaactttggtctggaaaggatccatcatactctcacttaagagtatttggatgtttggcgtacgcacacgtatccaaggagctcaggcagaagctagatgcaaggaccactccatgtattttcataggctatggagatgaagaatttggatacaggttatgggatcctaaggagaaaaaggtaatcagaagtagggacgtggtgttccatgaaagccagacaatagaagatattgaaaagcccacaatatctcagaagtcaaatgttgcagctcaggtgccagaagcagcaacagaaccattgataagaaatggtgatacagtgccagaagatataccagaagtagaaaacaatgaggaagaagatggtgttgagcagggggagccacaacccgctctgccagatgttccaggaccatcacaagacccagatgatggtggatctcctcatattccagaagttcgtagatctgaacgagatcggattccatccagaaggtatccagaatccgagtatcttctacttactgaagatggagaaccagagagtttccatgaagcagtatctcataaggataaagaaaaatggctgctagcaatgaaggatgagatggattctcttgtgaagaatcaaacttatgagatcatagaacttccaaaagggaagaaggcactgaaaaataaatgggtgttcaagctgaagaaagatggcagcggaaaagtggtgaaatacaaagcacggcttgtagtcaaaggattccaacagaaaaaggggattgattttgacgagatattttcacccgtagtcaagatgacttcaatcagagtcatacttggattggtcgcaagtatgaacttggagcttgaacagatggatgtgaagacagcttttcttcacggagatttaaaggaagaaatctacatggagcagccggaaggttttgaggtttcaggagaaaacctcgtatgcaagctaaagaaaagcttgtacggtctgaagcaggcacctaggcagtggtacaagaagtttgactcgtgcatggtgagtcaagggtacaagaaaactgcagcagatgagtgtgtctacattcagaagttttctgatggaaatttcgttgctcttctactatatgtagacgatattctgatcgtggggaaagatgcaacgaaaatcaatcagctgaagaagaaactctctaagtcttttgacatgaaagacttaggaccagctcaacaaatcttgggaatgcagattactcgagataggaagaatcagaggttatggctatctcaggagaagtatattgaacgagtacttgaacggttcaatatgaacaatgccaaacctgttagctgtccattagctaaccatttcaagttgagcaagagtttatgtccctcatccaaggaagagatcggggagatgtcatcagtaccatattcttcagctgttggaagtttaatgtatgcaatggtgtgtacgaggccagatattgctcacgcagtgggaacggtgagtcgttttctctccaatcccggaaaagagcattggaaggcggtaaaatggattctcaggtaccttaggggtacaacaaagatatgtctttgttacgggggagctgatccaatcttggaaggttttacagattcagatatggctggagatcctgatagtaggaaatctacttcaggattcatttacacttttgcaggaggagctgtctcatggcagtcaagactacagaagtgtgttgctttatccacaaccgaagcagaatatattgctgccgcagaagctggaaaagagatgttgtggttaaagcgttaccttcaagaattgggaatcaagcaaaaggagtacaaggtacattgtgatagtcagagtgctctagatttgagcaagaactcaatgtatcattcnnnnnnnnnntcagtaccatattcttcagctgttggaagtttaatgtatgcaatggtgtgtacgaggccagatattgctcacgcagtgggaacggtgagtcgttttctctccaatcccggaaaagagcattggaaggcggtaaaatggattctcaggtaccttaggggtacaacaaagatatgtctttgttacgggggagctgatccaatcttggaaggttttacagattcagatatggctggagatcctgatagtaggaaatctacttcaggattcatttacacttttgcaggaggagctgtctcatggcagtcaagactacagaagtgtgttgctttatccacaaccgaagcagaatatattgctgccgcagaagctggaaaagagatgttgtggttaaagcgttaccttcaagaattgggaatcaagcaaaaggagtacaaggtacattgtgatagtcagagtactctagatttgagcaagaactcaatgtatcattcccgaacaaaacatattgatattcgctatcattggatacgtgaagtaatggatcgacaactgttgagactaataaagatccatacaaaggagaatcctgcagacatgatgacgaaggtggtgactcgagagaagttagagttatgcagagacatagctggaatgttttctccagatacagctggagggggagaattgctgatttccagctgtacatggagtggccattaatggtttccagcctgttccagccgtccaccaattccagccatcaccagctgtccaccaacttccagctgtgtactagttgtctgccacaaattctccaacgtacaccattcttccccctataaatagaggtgcaaacctcacttgtaaatcatcaactagacacagagaaacaccaagagtgaattcatccaagtagtgagaattcttagtgagtgttgtgtcagtggtctgagtttgagagttgttttgttttttgagtttgtaaatctctgtaattctattcttgtgagtaatagaagctgtttttctctcaaattcgtgtgtaccaacacccaattgatccgttggcctcaacatgaatgagcttacaacagaaggaaacaacaagaacaacaacaagaaaaagttgaaggaggatgctatagaccatatttctgcaaacaaagccgccgcggatgctgtcaaaatgacagcagaatttctagttggaaaattggcaactggctctgctgacatccaaaggcaagctgcatatgagcttcggttacttgcaaaaaccggcatggttagccgaagcgtcatagctgaggtaggggctattccctttcttgtaacactcctaggatctcaagattcaagattccaagagcatgcagtgacagccttgttcaacctctcgatattcgacaacaacaagattttgatcatggcagcaggagcagttgatagcatagtggaagtacttgaatcaggaaagaccatggaggcaagggagaatgcagcagcatcaatatacagcttgtctatggtggatgagtgcaaagtgaaaattggaggaagaccaagggcaatacctgctttagttggactcttgaaagaaggcactccaatagggaaaagagatgctgcaagtgcactgttcaacctttcagtttacaatcctaacaaggcaagtgttgttaaagctggggcagttcctgtgctggttgagttgctgatggatgacaaggctggcataacagatgatgcacttgcagtgctcgctttgctccttggatgctctgaggggctagaagagataaggaatagtagagcattggtgccacttcttattgatcttctgagatttggatcagtgaaagggaaggaaaattcaataacccttttgctaggattgtgcaaagaagagggagaagtggtgacaaggaggctcttggcaaatccaaggagcattccttcacttcaaagcttggctgctgatggttctttgagagctaggagaaaggcagatgcagtgcttaggttcctcaataggtgctgctctcagcctcatcattctgtttagcagagtagggtgtgtaatcacatcacttcacagttgtatattttgtgaatggtatacatgaaagattggtcatcatttgttgtttgcaatttttatggtatcaaaactttggagctttgtccattgattgctgattaggaaataataatccctggattgagtagttaattatcacttgggcaaatgcttgcttctataattttttaagaatgtagattgattagcaccattgcctaactttatttacttgtctgtatgtctgtgttgcctttcgaaattttagctcaatgtgcatttggtgaattggtaaactaattcaactattccacttacctcccattctttctgtttcactgtgatatatgttgcagacatccatgtaggttgcaaatcaaaagcctggattagagtggtgcaaactggctgactttgtcatttttgtatgaaatcttaaatttataaaattaaatttaatcatattaatgttcaggcccgtgagatggagtattaaatttaataggttaaatatctttttatatctgaaaaataagataactttattttttgacgtggagtatgactaatttctttacgacaatttatttagtcataaatttgcattcataagaacatctatttcatccttgattttaatgaaattttcgtttaatttttgagtttaatagtcatgcaatattaatgtaaaacattttactttgtcaattaatccaaaatcactactaatataaattttaagatatttattataaaaattaataaaattattatatataatagattatgattggatgacaccttacaattggtgcataatttattttctcaatttattttattaaatgatgaaaagacatttataaaattttaatttttttatagtttttattgttaagtctgtgaccaatacactagcctctgagttaactgagttagacatgtactgcaaaaaaaatttgtttgaatctacaatcttcgcgttattagtactttactctaataaattaaactaatagatcaattataataaaaaataattaatattattatatataatactaaaatttctaatatatatttaatgcatatataagtttacataataaattttacaataattaattttgatctaataatatattttttatatatataaattttaattaaacctataatttttatttaaaatttgtatatgtaaaaaaatacattgttagatcaaaattaattgttataaaatttattgtataaacttatatatgtattaaatatatattagaaattttagtcttatatataataatattaatttttttaatataattgacttattaatttaattggttagagcgtcatattaataaaattaagattatatatttgaaatatgcatagaccattatttttaaattattttgtaaaacatattttttaaatacggattgacatgagtcatatgtttaatataccctttaatttatcttattttcacatgagtcatatgtttaaaccaagagtgcatagattaatttttaatgttatggtttctatttccagttttttacttattagatttcgaatttctcccttttttctaaaaaaaatatttgtcggggaagagtttatctttaattctttagggttggaatgatccaaatccgtcatgatattcccatcaattaactgtagatgtatttatttattttttgttacaatttattggcatttcagtttacgtctcttgacataatatattcataacgagatattgacaaacacttattattcttatttatattatcttatagaaagtatattgtttataaagaaatatgcaaattaaaacaaggcaacctaaatttttctttcgtctgaattccctgataaagttctacgaagcttaaaaaaaatgaaagcactttgattatgtaacttcttctcttgaaagcaaactaaatattaaacaacgtatacattttttatacatactaagctgaactaatggtaatggatttttataatgatttaattaagagacatatttttcatacaacaactaatttaattacattatgtatgtcgttcatttgacaaaattaatgatagaataattttaatttaaatttcacataatacattctcgaagaaaactaataattttaaatatgactaaactttgaatctagaatttgtctcacataagatcataaatgtcaaaatttgtgaaaatattttgaaatcagcggagtagaaacaattttctttttttttttttttattaatgttggttattgcagaggcatacagtggctccaacgtgtgtgcaacgcccaacagaacatggattcacaagcctacaacaagaagcttcaatccacactcaatgctaagatcgcttatttcgatatatatggtcaaaaacccaactaaatatggtaattaattactcactcattttaatttgcacgccttgtcacatgtttggctcgtgctaattttgttaattgataatttgtgaaggctttgcacaaactcttgaaggatgctgtgggatgcacatgacctaacttgccccgattcgtctaagtacctgttctgggatgctgtgcaccttactgaagcagggaactacgttcttgccgatagtggtcaataaaatgtgcttccataccttagtagttaggctattatgattttgattttatatacgcatttttttccttaggataattaatcagccaattggaaggatctgaataatcctcatttagggtgattatattattttttttcatggcggtttaggaaatttattttatctatagagcatgtcattttgtgtaggtacaacaattactttcttttgataatattaaaaacacttttggagctattgattggttaccttttcattaaattgtcattcttaataaaaataattctttattcagatgtgtatttttacacactactcttagaattagctgatgagaccataggagtgatgttatatcatcttattttatcctcttacaaattctcttattactccaattctaaaataatactcttcttaaattatttcacataaatcaagaaaaaataataaatagataaaaaagaatgataatttattaaaattagtcttatatcattaataatttatttataaattttgtagtctatcattaatataccattataagggatataagtgaaaaatataattaatgttacattaaaataattaaaatgataattattttagaataattttttttcttacacactaattataataagacgtatgaaatatctttagcgacttgaaaatataaaacatatttaaaaatttaccataaaaggtagtaggagactttataagaggatggagcatgagaatttataattattctttctcaaacacaatcctaatagtaatcataatttgaacgtgatttcactgccaaaaagaatagttaaaattgaaaaaaattattcctactagcatggtgtactttttatagttataaatgaatagttcaagaatcattcttttnnnnnnnnnnnnnnnnnnnnnnnnnnnnnnnnnnnnnnnnnnnnnnnnnnnnnnnnnnnnnnnnnnnnnnnnnnnnnnnnnnnnnnnnnnnnnnnnnnnnnnnnnnnnnnnnnnnnnnnnnnnnnnnnnnnnnnnnnnnnnnnnnnnnnnnnnnnnnnnnnnnnnnnnnnnnnnnnnnnnnnnnnnnnnnnnnnnnnnnnnnnnnnnnnnnnnnnnnnnnnnnnnnnnnnnnnnnnnnnnnnnnnnnnnnnnnnnnnnnnnnnnnnnnnnnnnnnnnnnnnnnnnnnnnnnnnnnnnnnnnnnnnnnnnnnnnnnnnnnnnnnnnnnnnnnnnnnnnnnnnnnnnnnnnnnnnnnnnnnnnnnnnnnnnnnnnnnnnnnnnnnnnnnnnnnnnnnnnnnnnnnnnnnnnnnnnnnnnnnnnnnnnnnnnnnnnnnnnnnnnnnnnnnnnnnnnnnnnnnnnnnnnnnnnnnnnnnnnnnnnnnnnnnnnnnnnnnnnnnnnnnnnnnnnnnnnnnnnnnnnnnnnnnnnnnnnnnnnnnnnnnnnnnnnnnnnnnnnnnnnnnnnnnnnnnnnnnnnnnnnnnnnnnnnnnnnnnnnnnnnnnnnnnnnnnnnnnnnnnnnnnnnnnnnnnnnnnnnnnnnnnnnnnnnnnnnnnnnnnnnnnnnnnnataatattttcaatattttttctctgcttttctttggatgaatttcaaacattaccatcatcattacttagaaacatatttatcttaaactattattattttatcttcatgtatatactcgatcatcttaatcgtctgtatatttaactctatcatttaaaaaaaatgaattttaaaaaactttttaaatcttctcacgaggaaaatggccttatgttttcaatcatcacccttgtgtactgcaaagattgaactcaattcaatatcagtatgagtaggtatatcttaaattacataaaaaaaggtagtggatactttaacaactcacatagtgatctctcaacataaagagtggtgtaaattttacaatccaagcaggccggaaaaagtaaagaattctcagttgcaatgcttctaaaattgcagtacataagtgcattattttcgaatttcatacaactttatgtgaaaatctgccgatacgttatgaatgaatgccctctcttattttgtctggatttaaggtaagaaatgaaaatatcgtgccgagacagattgcaaaaaatatttaatgcttgaagaaccacaaaaaaaaaaaatagcaaagaacacagctgctatgaaggcgctgagaagctaaacctaaacccagtcttcccacgatcatgctcaccctttctgagtatgtaaaagtagttaccctgaaacaagaaatatgttagtgaagaaatcacagaaaattttgatataacacacatatagcaaattaagaaaaggcatgatggagaataggagatgggtacaacaaataagagatttactaatcctgattaaaatgctaacctatcaattcaacagattgttcaccttaattaccttgctaaaattcaaataccaatttatagcagatagctgacaaatacatgcatacatcataagtaataagtgctcagttcaaaactaaatgagggaaaagacaaaaaaaagaggaaaactatgcaagcaacaagatttcaggattaaaaaaattatatattctcttttctttccttcatactctttaaaatgtccaaatataacaaggttaccccaaattccttcatatatattttgtcttcatcattgacatttcacttctaactccactcaatctcccaacttttggttattttttatcttctttttaattaaatactagtataaagaaattaaaacagatgctgacctctaggcggaagagtctagtaggaataactactccacatcctactgacattcgaaaggattctaagaactttcgaggagagaagtgcttatattcattctgagttaatttagcagcattcccagaaccaacaaaaacatgcccatggattccatgttctctcagccacctaattggaagatcaaaagagagatctgcaaaagcagtaacagcaacatcgccaccaatgaagtcccatccagaggaatcaacattgtcatcattagacccatctctattttgcctccgaggttcagtaggacctaatcctctagttttaaatccccataatgttgttggtcctcctagggtgcaaactggagaaaaatcaccacccaaataaaacctttctggaaggggagatggcttggttttgaatccatgcccccatggaaacacagcaccagcagatatcccaaggtttagtgctgtattgtaaaacccaaaagggacagcaaagcgaacatcaaactcctgcattagaacttagaagagttaacagagttactcaagaaaaaatagttacaaaaaacagagcaaagaaaagaaatattaaaatgtagaagagttttcagcaacaaatgttttatgagcaaacaagtcccaaccatttttgtccccaaattgtaaaacactttcgtgatagtccaaggttcactttctggcaaataagtcccagaaattgaattttgttactcaagttagtcgttgacgttagtcatccactaacactattaaccaacacatgatgtgactgccaaaacggcaaatagcatgccacatcaaatgctggttaatggaattagtggataactaatgacagagactaacttgactaacggaattcaatttcgaattcttatttgctagagttaaatctagggtctactatggcattgctttacctcatacttgtgaaatccttcatggacatttgcactgagatttcactctcacagtctcactaagggatattgaacccatcaatgaataataaggctataagcaaccaattaagttcttgtgccaatttttttatgaaaatgaaaaaataactacatggatcattcatcatatgaagcattgtcccaaggaagagtaacaagtaccatgataacaaatgacaaataaggggccatttgtttgtgctttttaaagaagaaaatatttaacttttttatagtaaatagatttttaaaagaactcaagaaaagaaagaaaaatccatttgagtgcttctcaaaatgcacagactgtattcccttctaagggaagagatcttctttgacaaagaagacgaactccttccatatataaaaaaaaataaaaataaatataaatttttaaccataattttatgcttattaactccatcaaatcattttaaatttctgatcgcaacaattttaaaattctagccactcccaagattatttcaataattcttacgccaaaatcatttaacatgagttactaagtttcatgcactacacataaatttgcttagtaacagattaattggaggaaaagaaaagcatttaattacacctgacgcagaaaccgcaagctcctgggatccagtgtaaggccaccaacatgagtggtggaaagaaaagcatatccttctgttggcctaataggagaatttctcctatcaattttaaatgtatacttcaaagatgacactaaaccatgcccaagctgcctccttatagacctggatgacatctgtgacggatctgttaaggtacgccatccaagggtgtatgctaagtcatggtgttttgtcgagattaagccaagagatgcacccaacaaccgctccttatatgaggatggctcctgccaatcttgggaaagcatggatatccgtgttacaataggagtcaaaaatcctttaactcgaggagcatacacccctacactcacctcggtcgcttggttggcaccataggccaaagaagcatcacatagatcaccataacccaacaagttcttatacttaagagcaccttcagcagtccaagaactagtctacaaaacatcacataatttccacataaataaaaattagatccccttgcccttgacgacccctaaaacctaacatgaaaaatgttaggacaaacttcaatacagttccattgctgttgtttgtgctccaattagaatttaaatttcaaattaataatccacattataaaggtttgcatcaaatgattatgtaagtgaaactccaattctgattgaaaaattgtacaaggagctgcatataagtttagtctacataggaagcgtgagaacatgagcattcaatctgtcatagacggtcaaggttagttttacttaaatctaaacttgactatctaagtaagatggaataatcagagttaattttctcacttctcacttgatacttttatatatttgcatataagtttctatacaatgcaatgcctcgaatcgaagtaaaatgtactcagttcgagtctgagaagaataaagtgtaccgagggtttggtataaacgccgaattcgccggaaactttgttatcggtttcgacaacgtcgacgatgacattggcagtgtttggaagctctcgtggtccagcctcgaggcgaaccttgcaggaatcgaagatttcgagaccctgaagcttggcaatggcgatttgcgaagcttgcataagctcctgcatgctggtggcgttctcgatgcctttcagctccgcctcaatcacccaatccttcgtcttcgtgttgccgtttatgaccacgtcgtgcactcggatcggaaccagctccgacgacaagcgccgcgtaagggtttccaccttgaaacgctgttcccgcaacttggacgctgcagattggggaattccgcgattcggttcctgaacgacgtcgtcgtcatcgttgtcttcgtcttcttcgatgtcttcgtcgtcgctaggttccacatcgtcgttggtggagtgttgagtgtgattgttagggttcagaggagttgcttcttcatcttctgtgtttgtcatgtgagactcggtcaatttgtgacacaattgagtagcgagtgtagttggcagacgccaccttctgttacaaattacagtgtttttttgaacaagagtccattacacagtctctttcgctagagcccagagatgtcttttttatttatttatttcttctgtaagaatcgaaggcaatttcaatttcatgacgcattcctcaatcactgaattagattacttgacagaattcagagatatcagatactctaattaatttagttgtttttctttttaattaaaaaatatctctatcttaaggcataaacatctattattattttttaatttgatttaaacaaacttttgagattatattttttttttcaattgttgcccataggattgcaaaatgtcaaagcatggttctaaaggtttggcttggcttgtagagcatccaaccatggtgatattagatacaggttttggttaatgaatttctaaattttattagcagaaaaaggtgttatttgtgtgacatttcaaaatgagtcagtctcattgtgtcaaagtaatatttatatttgagtaatgttatatatatattaagttttacaaaaatacataaaggaaaggaaagagataagaagagagaaaaaataagtgtatgatacaataagtgatgagataaagataaataaaaagaaaatatcaatataagaaaaatattttaaattttttatgcgtaaacaatattattctttatattttctataggttcataatgtaaatggaactcgtgtcatatttatctaagaattaattttaaatttcgtggtatatcaaataatgtttttcaagatatatacagaaatatattagtagtaatatagtgtatcattgtattgaatacagtaaagtgcatggaatgggtttgaaaaattcttaatcctccggctattttttatggtaagttttaaatatattttatacttttaagataataaatatttttactttttattcaatatttatcatcataaaagatagtaggaagattcatagatgaatatagtaagaggatttagcattactgaacgaggaaagagatataaaattaactcttggtatgtagaggtcaataaaagagcaagtaatagagttgtaatgttctgtttcatctagtttcataattgacaatcactaccctctattgtcaaaagaaagcttgcaacaacaaatgcaaaagaaagcctcactcgttaatacttgatagttttgaacttttgatcaatgcacgtgagcaggactatgattattaaactattagtttgttcggaacatatgaagtggatgagaagatttggaaatatcttgatcaagtgatatacaaaaagctattttctaggtgcatttccataggatacagttaatataagaaaaaaaaaaaaaaacacacccaaaagaacttcagcacaccattatacttcaagtaagaacttttttatgccttcacctaaggaaaaaaaggatcacaatgctaaaagctctcaaagacttttaaaaattacaatctgccacactgatttcaacgtgcttctgcagatgcaatctcaatctctgcccaccaaagtggagaaagttttggaaccgcagattcaggtgttatttttgttatctctgtgagtctctcactcacatctttcattgttggtctcttctgtggatcagggtggacacaagatgtaatcaattcagcaacttgttccagctgatcttcttggtaagatactagaattggatccactatttctttgaggggctggtccacttctaaatagtgtgatgcccagttttcaagtgaatccccatgttctactgaataaggaagacgacccgtgaccatttcaaatagtagaacacccaagctataaacattactttctggagttgctagtggcttgtccatagctcttgtctcagctgaggctatgtcattggagaaacttaaatctgagagtttggcagcgtagtcatcggtgaggtaaacggctgaacaattcagcttgattaaggccataggaggatccaattggtgcatatgttgcaagcaataagccacacccgttgcaactctaagtcttgttccccaatccaagtgctcagcctcttttactggaattcacaaaaagatctattgacagggataataattggagagcattgttgcttccaaagagaaaaggaaacatagtataatttcaaatattgtaatggcaatttcacattgaaaattacaaaattatgagcgagttttaataaataaggagtgaaacctacacagttatgtgattatcaacaaatttcagccaataattgacagtatgatagaaagagtgtgttattagcatttctccttagtgtgtagtagttactctaaaatgatacattgcttactgtgtaaatgctcaaatagtgttccgtttggggcatattcaaaaaccaacattctggtgaaaggctcctcttcttcacagtatccaataagattcacaaaattcttgggttcactttcgacaatgtatctatctgacaccatgatggttaagaagttagtaataatcaaatttcctaaattgcaattctacagttaaatttgctgggtttttttttttttnnnnnnnnnnnnnnnnnnnnnnnnnnnnnnnnnnnnnnnnnnnnnnnnnnnnnnnnnnnnnnnnnnnnnnnnnnnnnnnnnnnnnnnnnnnnnnnnnnnnnnnnnnnnnnnnnnnnnnnnnnnnnnnnnnnnnnnnnnnnnnnnnnnnnnnnnnnnnnnnnnnnnnnnnnnnnnnnnnnnnnnnnnnnnnnnnnnnnnnnnnnnnnnnnnnnnnnnnnnnnnnnnnnnnnnnnnnnnnnnnnnnnnnnnnnnnnnnnnnnnnnnnnnnnnnnnnnnnnnnnnnnnnnnnnnnnnnnnnnnnnnnnnnnnnnnnnnnnnnnnnnnnnnnnnnnnnnnnnnnnnnnnnnnnnnnnnnnnnnnnnnnnnnnnnnnnnnttttttctgttatgataattgatgtaccttgcttctaaattgagcttctaaagcttttgaccaattcttggatgatgttatggaaacaaaagctacagctatttcaacgccactagacaaagttcctttgtacagtataccaatgggtgaagtaccaattacattactaaaatcttcacatgctgcttcaagatctgatctctttaacttttgcgcacctgaaaatgtaaaacactgtcatgcatgtacataggcagaaaacatacatataagcatgggaaatatagctcaaagacatgggaatgcaatcattcaaagctaaatcaattggatgaccaaagggcccaaagaaaacaagttaaataagttcctattatttgtcatgtttcaggaatcctgagtcaatatgcagtatgggatttagatcttctgtttttctaataataaaggacatggtccttcttggaaagagaaagacattttattttattttattaatataactagtagactctataactaataatgtaggtctttgcatgataaaaattatgtgctgcttatagccattgttttactcttgttaacttatagtaaaagaaatgcttagattcaccagttacaaatgccttctgaagctgtccacttagtcccatggcccaaggtctgacattagctacctttgttttacaaagatatatgccaatgcttgaaaaaataagaaacacagcaccacctacaactccagccaaaataggaactgtatgaacctttgatgaggtgcttttagttttagatagtgttccagaacctgatgtagagtgggaaggagaagaatcagaagcctttttcctatgaggagctagctttggccctggtggttttgctgagcctgatggggaagcagaaggaggagaaggtttagaattttgtagtagaccacgagtaactttaccttgatcaatatgccttcaaagaagagaaaattatgtgagtttgtttttttttagaaaaaagaaataggataagattagcctataataatagcatgagatgggcacatcttagaacacaaaatgcaagtacataagaaggcacataattcctgagttggaccacctttcaatcaattagtaacataccatgtggtggctctttctgtacaagctggcattttagcagcattagttagctgattttcatctacttgacattcagaaagcatcctcagttcatttatttcgggagataaaccaacaagaaattcattgttatccagcaaactgcaataaagaagaaactaagtacatgaagagattaaaaaaaaaagtgaaattgaactgtcttaatactatcatcatcatcatcatacaggattgctagtgagatattactccctagatcagcaggtagatgtccactgaagttgttgtatcccaaatccaaaacctccagttcttttaactctacaaatccttcagggatggtcccagagaaagagttgttccgcaaaatactgtagcatattcaccctctaattataagaatgaacgccaatatataaatcatgaagaaaaggaactacaaagtcaattccaccaagtaacaaacaattacttacatagactttatgctgacaagtttcaaaagctcaggtgccagagttcctccaaggcagagatccttcaaattccttagcaaaggaaaattttctcttcattaaaatccctcaagtttaacaatacaaacactagtgattagatttatcacaagagactaatgttcaaaaattattgtgaaaatagccactatcggtagagttgatcacttgagcatacggttttagtgttttaccaagagaaaataaagttaaaaaaaaaacttggatctcacatttgatgacacaaataaagagacagattaaaaaagcatgtatattcatcttctttacttgccctgcttgttcccataaattataccacacaattggttacaacttacaaattacaaataatcagtttctgtcaaaacagataacagaataagcacttacaagaccacaactgttccacccgagcactcaactccaaaccaatgacaagggtcaacagaagcctcatcatcaacccaatttgacaaagcaccaaaagggtcactcactattttctgcctcaacttcaaaagagcattacctgcacacacacacacacacacacacacacaaaccatgtctcagcatctatcttccaagtagccacaagattccacaaactcaaaattccaccactactagtcaagtaccttcttcattcaaagaacagcacaaacccaagttgtgaaacaagaaaaaaaccgccacaaagcaaaaagctatagaaagatccttgaaccgactgagtttcctgttcttgcccattcttgctgcaagaaacaaaccttggatggagcttaatagcccaaggaagcaaagtttgaagttttaaacatattaaaaagaagacaagttcaagaacatgtagagtggaaggagcttaagtgtgatatctaaggtgaagcaataaagcatggactggttctaagttctaagattgtcgtgagttgtgacacctgcaacgcaatgcaagagagactggtgaatggacccaaagagacttgaaagcgtgttcgctgtcgtgcagctaacaagtcataatagtaacggtggaaggagtgaaggacaacaacatattcacataacctttttaatacgttattgtgaatttgaggaaaaaaataaaccaaaaaaacttgtcatcctattaattttttccaaatacaaaacatgtttcttataaaaaatattcgagacagtatcatttaatcaaatcttattaatatatttttaaattcttaatgttaaaagtaaaagattttgccttgtctttagttaaatgatgtgatcaccacacctttcttgtttaacttaaaagatcaaattaagagttattattttctaaattttattacattactaaggactaaggagtatcattttttataggcttaattaaatatgtttttaatcatttaaatttgaatactttttttatactccaaatttagaattctttttttagtccttaaaatacacaaaacaatttctttaatctttttgttgcatagtatgactcaaacatggaacaagagatttatgacaatttttaactggcaaaatttgatttttctattctatattttaaagtatgtttttgacaataaaaaatcacgataattaagtcagtaaaaaaattaaaaaccaattaatccttttaaaaatcactttaatttttttattgacttgattctaacaatttcaaaccaccaaaaaattatactttaaaatataaaatagaaaattaaattttggcaattaaaaatgtttaaaattgtaaatctcttatttttgttttcactcannnnnnnnnnnnnnnnnnnnnnnnnnnnnnnnnnnnnnnnnnnnnnnnnnnnnnnnnnnnnnnnnnnnnnnnnnnnnnnnnnnnnnnnnnnnnnnnnnnnnnnnnnnnnnnnnnnnnnnnnnnnnnnnnnnnnnnnnnnnnnnnnnnnnnnnnnnnnnnnnnnnnnnnnnnnnnnnnnnnnnnnnnnnnnnnnnnnnnnnnnnnnnnnnnnnnnnnnnnnnnnnnnnnnnnnnnnnnnnnnnnnnnnnnnnnnnnnnnnnnnnnnnnnnnnnnnnnnnnnnnnnnnnnnnnnnnnnnnnnnnnnnnnnnnnnnnnnnnnnnnnnnnnnnnnnnnnnnnnnnnnnnnnnnnnnnnnnnnnnnnnnnnnnnnnnnnnnnnnnnnnnnnnnnnnnnnnnnnnnnnnnnnnnnnnnnnnnnnnnnnnnnnnnnnnnnnnnnnnnnnnnnnnnnnnnnnnnnnnnnnnnnnnnnnnnnnnnnnnnnnnnnnnnnnnnnnnnnnnnnnnnnnnnnnnnnnnnnnnnnnnnnnnnnnnnnnnnnnnnnnnnnnnnnnnnnnnnnnnnnnnnnnnnnnnnnnnnnnnnnnnnnnnnnnnnnnnnnnnnnnnnnnnnnnnnnnnnnnnnnnnnnnnnnnnnnnnnnnnnnnnnnnnnnnnnnnnnnnnnnnnnnnnnnnnnnnnnnnnnnnnnnnnnnnnnnnnnnnnnnnnnnnnnnnnnnnnnnnnnnnnnnnnnnnnnnnnnnnnnnnnnnnnnnnnnnnnnnnnnnnnnnnnnnnnnnnnnnnnnnnnnnnnnnnnnnnnnnnnnnnnnnnnnnnncttgtcacaaaattaaaaatatgaaagaaaaaatatatattttcctctcatatctcaaaattgtgttatttaattaactatatcagctcatttgttttggtacagaaactacctaattaatttaaccatttagttatataaatttaatcaaatatttaaataacgatatacgattaatttgttaaatatatttgacaaatgttaaaaataagatatctcttcatctcctttaataaatatatacttatctgtaaataattaagtgataaaattaattaatttgatcattaatcaagcacaagtctaggaggagtcgcatctgaagtctgaacaagtaacacgagccatataaataaaagtaaaacagcagtaaggatatcaacgaatgaatgaatggctgtgttttgatgaggattatatgatgatatgagaaatagatcgtaggttttggtgctatttaatatttatgtttattctccgatgacttgacttagctattgttatagttggtgatgatattaagacatgcctcatgtcaatgtctgtctttctcctatacttggtaaaagaccccctttatagatggcactatcaactttataaacaaacaatagtagtactttctcttaatatatttttttgttattaaaaaatataaacacagatattatagagaatatatttgagtgactagctagtttatttagactttgtttaggagagagattttagaggggaagggagggaacggaaaggtttggatagtaacatctcattgtttggaaattttaatttttgaggaaaaaaatttgaagatttttaaaactcctctgaattcttttaaatcattaaaattattgtttccccaatttggagatttttagaaggaaaagtaataaaattactatcctacaccagctacaaattcaaaattaagttttatttataaaatatagagtgtattaattttttaagtaaggataaaattgtaaaaatttcttattaattcttcatttctctctcttaatatatttttaactcccaaataaggaggaatgaacttccctcattttccttcctttccttccccttccttcccctttaggctttgtttgggagttaggaggggaaggaaaggaaagagattcaaggggaagggaggggaaggaaagggaggaaaatgagggaagttctttcctccttgtttgggagttaaaaatatattaagagagggaaattgagagttaataagatattaaatatgaaaattatataatttaaatgtaaaaatatattaaaaatatattttaatatattttagaatttgtagttggggtagaatagtaattttaattatttcctcctaaaaaccccccaaattgggggaacaacaatttttaggcttgggaggattttggaggagttttaaaaatcctcaaatgctttccctccaaaattaaaactcccaaacaaggagaaggcaccatctaaacctttcccttccctcccttcccctctaaaatcccactcccaaacaaagccttaatctctttccttcccttcccctcctaactcctaaacaaagccttagtagttgcttaatcagtctttattatataataatttgttataaaattaagtttttttaactatatttttagtcccttgcagtataaaaaaaacaactatgtttttagtcttataaatctagtaagttttagttttaatctttcaaaataatttgttaatgatttttataattttattttttaaaataattattattattatttcctgctgacatcatatgtatataagtattataaaaaaattctctctctataatatatatatatatatatatcatgcattatataaaaagtatattctaatactattttattagcttatcaaatttaaatataatatatatcattaaggaatttctatttccactcctcctaatttataatatactctcctttataattatttttactaaaatagcttggaaattgcactccgcttttttaattcttattgcctccaactaggttaaagcagagtgggataagttcagaaatttggtttggtagaattaaggataacgttcgtgcaaatgagattattagaaactaaatgcatggaatgatgcacacgttccataatcactatttctttttgttcttgtttgctatttaattttgtaggtattctagtgaccaagtttcaggtatattgctctcaacattaattaattactttattttcttggtatgtgttatttagtgatgccatccattgtttctattaggttttgtgcaagtagtgtaggtgtcaacgggttcgatgaaacttaggatttgtaaagaaaagggggcagggcgggtgggggaggggtggtgcgcaaatatattagtaattagggaaagtgaaaatagcaattcgctctcattatactttctttttaatcactaaactaaacttcaaaatttgttggcacactatatgctagaaagtgtaatatttgcaaataattctaacctgacttattacacggagaacgagtacacgtacaacttgtgctccgcttatgaagtaagccggataattttactaattcaaattggtaagtctatctgagtatgtgacagctttctctttgtacgtcttaaacaaaatattgatttaatttttctacctttacactcaaactcttatgtatatttatacttttgtgataattaaatgctacgtgtagatggataattttagtcttttaaacattttcttcgagactagttttaatatcttttatggaaaagttgttgaaatagtttatttaatataaacaattgattgatcatctacgtttagcgaactctaatgtgaagacactaaattgaatttttgatgcttgagaggggatgcgacagtttaatttttggggggaaaatggttttatgagaacttcggggatgttgtcattagataaagaatccagacacccgccaaagatgtttaaattacatacctcgctcttgacactgacataagaactactcagattgtgaccttttaattttcataatggcacataacatcattaatgtacattgatttgcataaactctttcagcataagtggctattatataaaatagttattgttataatttatagacaatgatatataactacggaatataatctatatttcaaaattaatttaaaaagttttagaatgaaaaagagccatttcatttttataaaaaaagagaggattacttacgtctatgtcatcaaaattaattggttcagacaacattgacttttctgtctttattttatagcatttttttctctaaattaacttatgtggaaaatcacatcatttcatctagaattgacttttttttagctatctaaaaactataattaacaagtatcaaagaaaaactatataggaaagctcgtttagattggtcaaacattattttaatatgcacaacttaagttttatttgtttaataggtaaacggagtttatatacttctttaagtaaaacaacactgttcgatgtactttttgcagagggagaaaattcttctatagggtagtaaatttcgtttcaaactacatacaaacagccaattaatctaacattatttttgtcataatctatcatgtttttataataagcggctcaaaatttatttaaacccaaagataattgagttgagattgaatttaaaaagaggtgtactttttagtatgtttcatgctatactttagattgaacaataccgactcaacctaaggttacataatattgtaaaaacatatatatattttttaaataaaggataaattttaaaaactttttttctnnnnnnnnnnnnnnnnnnnnnnnnnnnnnnnnnnnnnnnnnnnnnnnnnnnnnnnnnnnnnnnnnnnnnnnnnnnnnnnnnnnnnnnnnnnnnnnnnnnnnnnnnnnnnnnnnnnnnnnnnnnnnnnnnnnnnnnnnnnnnnnnnnnnnnnnnnnnnnnnnnnnnnnnnnnnnnnnnnnnnnnnnnnnnnnnnnnnnnnnnnnnnnnnnnnnnnnnnnnnnnnnnnnnnnnnnnnnnnnnnnnnnnnnnnnnnnnnnnnnnnnnnnnnnnnnnnnnnnnnnnnnnnnnnnnnnnnnnnnnnnnnnnnnnnnnnnnnnnnnnnnnnnnnnnnnnnnnnnnnnnnnnnnnnnnnnnnnnnnnnnnnnnnnnnnnnnnnnnnnnnnnnnnnnnnnnnnnnnnnnnnnnnnnnnnnnnnnnnnnnnnnnnnnnnnnnnnnnnnnnnnnnnnnnnnnnnnnnnnnnnnnnnnnnnnnnnnnntgttgatttatttaaaaaaaaaacccaattatacatagtagtaatatattttttaatatgataatacttttatttaattgtatgtaaggtaattttcaattaaaaacaataattaaaactaccatatagtatacaagattttaaggtttttaaaaatactaaagactctgtgagttaggggttctattgggcattggccatgttttaacgagaatttattcattatttgatagccagttactcttaagttatttttttcagttgaaaatgttaaaaaaaatgatgacgagagatgtatctacacttctattatgcccaaatactattttacttttctaaaaccagccctgcatatgcattatattgcctatctttctgtactcctaacctcattccacttgaatagatacaaaaagcccaagattgttctcttcacaaacccaacaccaagcccaaacacattcatcatagtaaagcaaatgccattgagggcaaaagaaaaggtaatgtttgcattaaatccaacgtattatttttcatgtttagcatattgaatcgaattcagaataaaataattttatgactcattctggagcacagccaaggcaccaatgtacttttcctctaggaaggtttttggataaacattgtccatcctagttctgaacttcctacacactttcattctgatttaaggcgcacacacacacacaaaaaaaaaacaatataaatcaagagaagctggggtcatgttaacgtgagcgacatgagaattgagcatcaagaaatttgcgctataaaataagtgggccaagcaatcaaatcaacactccagaaaagcagggaaatacaaaatggaccagacccaaaacgaggtccaacacacacgattcccacgatctgccccaatgattattgtgcttgtgtatgagcaagaacaaaacttgaatcagaaaacggtaacaggttcgacccctttgaagaaaacttggcagcatcacccaccagacaataaatttcaaatttcgtgcccctgccagaggaacctctcacaaagatcattgtgtgctgtcagtacatggcttactccatgtgaaaatcattaatgttgaagtgccattacattacaacaaataatcaaaacctagctcctaagtcctaacaccatataataataataatacgatactatccatacactgagattctccagagactatacgattaattattaattaatatatgtaatgtagtaacataaacgaaatgaaagtgagaaagtgtttaattatcaacataaatatgatttaaatttcatcggtaagttgtctgtgagctgtaactaactgaggggtaggtagctatctggtgtggcgtgggagcacgaagaagcatgcggggcaccgaatcaagccgttggcgttgcaagaagaacagcttcggaatccgtttttctcagagaagactttgtggcttccgttgcactcatcgcacacaaggaatcggaagcctccgcaggagtcgcatgcgttctggttggagcgcgggaggcgttcgatgaggcggtggagctcgccgctctcgtggagctggcggacgtcgtcggcgccaccgacgtagacgccgccgacgaagacgcgcggcagggcgaggttgcttcggcggtcgaggacggcaaagagctcgtcgcggaagcggtcgtcgatggagacgtctcgctcgtcgacggcgacgcggaggccgcggaggatggatcggacggcgcggcagtcgtcgaaggtgcggcggacgatgcggagggaggtgaagtacacgacgacgccctggtcgaggccgggcgggagtgcggcggggacggcggcgcgtgaggcgccccaggcgcgaagcacggcggtggagatccggacgcggcggaagagcgacggagatttcggagcggccggttcgggtttttcttggaggaggctctggatgtctttgaaggaggaacaggagaagctgaaggagtgagttcgagaatgcgacggcgatgacgacggagatggtgacggcggtggagtgttgcggaaccggctgggtgagttaagccacggtggccacatgagaagtaatggtgaggaggaaagggaaaagggttttgagggtagtgactagtgaagagcggagagggtgctgatgggcatgcaaaggaaacgaaacgaaacgaaaggggggagggagagggttataaatggaaacttggttattgaaggttcaaccaggatgcatcatcatcgctaatcataaccctgcctagagaactagagaagcatgtgagtttttttttttctctcttttgactacggtttcacacatgaaaaaaaggaagatttaaaaaaaaaaatgataaataatggaagaagaagaagaagaaagagatacagaaaaagggtgtaatgtgtagggtatgaaaaaagttgttgtattttttcggttggtctattgtgcactgaagaatattttattatttttcatagtggtttattttcttagttagaaatagatcgtgttttttttaattgacaaaaaaaaattgtctcaactgtcaaggcaaaactgtaaaacaccttgccattgaatggaccatagtaaacgggtgattggagagtctgagtagttttaagtttaaattttattatttgtaaaaaaaagtttaaattttattagtattattgtaaaaagaaatagttaacatatgcactaatgtcattgttttttattgtttttaagtaattttgtttgagatatcattattatatattaaatatgaatactactttttatagtgattcaaacattgatttattgcctaaaaagaattggtttatcatattaatactaatgtcaatactttttttatattgctagacccaattcacagtactaatatatctttctattaaaaaaatactaacttcacacttattaacaaaagttaattaatatctcatggattcgaatttttttacaaatgtaaaataaggcttcatataatttctatcccatgtatataaagtggagtatttggacaatgggataagtaatttttttaggtcccactaaaaaaataagttttcgctctaaattatttttcattaaaacttgatataaaaataaaaacaaattatgtgaaatagaatctcaattaagcaaaatatatcttgaaaatgatctcatcaaatacaattaaattaatttaggtttgtttagactagttaataaacactgatgtaatgtagctttactttgttagaaaatatacaatgaagaatgttatgtcatttgagaatatatgtgagaaaaacaaagagaatataggaataacaattattagattaaagaatatttgatagtgtgtctcaattaaagatgtcaatatcatatataattggtatgtttgtctcattagaaaatgttaataaatatctttcaattttcaaatcaattttttttgtattccaaggaacttaacatcccaaattaaaaagaaaaaaaaattatgcacttataatataaaaactaatatttataattaaatgatattgtaaaacttatattgtatattgacattaaactcaaccaaaaacctttacagaaaatcggcaannnnnnnnnntaaatatattccaaataaagactgtaaaaaagaataaaatattttcaaaagtaaagaatgttgtgatatttattctatattttttaattgtttctaacttttccaacataaaaaaatatcaaaatttaagtaagtaaactttttaaaaaaattaaaattattttctaatttttgtacaaataaaatttaaacagcgtttctttgaaaaataataattactttttcattatattttttatcaataaaaataagatgtcattaaaaattacataaacagtacaataataatcaaaataaaaagcataatgtttaaatagtgatctaaaaagatactttggcaacgacaaatgatgctctgacctgagatctattgaatttgagaagtgagaagtgagtgtaaggtttcaaaaaataattggacaaacaagaaattatgagataatattaagagtagaatcggaaaaaaaaattactattactattaactaggtgttaaaaatctgaaaaactttatagaatatcgttttaaaaatgtcacaaactattttatcaaataatcctatttttcttatacaaataattttcaaataacttgaaagtgacattaagcacactcttaatcacctgaccaaatagtattagtccagccagtcctacctaacaattttccattagacattgttgaggagggacagaaaatctaacatttaatcctagcaatggctatttggattttggataatcgttgtcgtttcctaaattaaacatcaatacctttagctgataaagaaaactagctgctttaaaggagaataagcaaattagaataacatagataactgagggggaactaaaacttcatcacattcttaatcctctagagaagagaatctctccgtaggacaccttttggtcaaccttcaacgcatcgcgggaagcaagaactgtgcatgaaagaattacaataatcattagaacactttggatgtttattttaaacaaaagatagataagaggactacataataaataaataccacaaatttgatagaatagttgtgctgctgatgtccgtgtcattccagcagctaggttatgaagggattcaactggaggagctccaggtgtgtcaaaatgtgccttcatctgcctgttgatcaaatacaaggaatatgcaattattaaggtcaataaatttcttaaggttattaagattaataaatttcttaaagagactcatacgcttggatggaatcggttatcttgtcattaggatgattgatgttcacttgtgtttgagtgggtcctgtttccacgaggagttctgaaaagaaatttatgagactgatgtatgtgctataagtggataaagaatatatatcattacagcaaggctgcttctaatattagagaagccttaacaagtaatatactatataaaaaaannnnnnnnnnnnnnnnnnnnnnnnnnnnnnnnnnnnnnnnnnnnnnnnnnnnnnnnnnnnnnnnnnnnnnnnnnnnnnnnnnnnnnnnnnnnnnnnnnnnnnnnnnnnnnnnnnnnnnnnnnnnnnnnnnnnnnnnnnnnnnnnnnnnnnnnnnnnnnnnnnnnnnnnnnnnnnnnnnnnnnnnnnnnnnnnnnnnnnnnnnnnnnnnnnnnnnnnnnnnnnnnnnnnnnnnnnnnnnnnnnnnnnnnnnnnnnnnnnnnnnnnnnnnnnnnnnnnnnnnnnnnnnnnnnnnnnnnnnnnnnnnnnnnnnnnnnnnnnnnnnnnnnnnnnnnnnnnnnnnnnnnnnnnnnnnnnnnnnnnnnnnnnnnnnnnnnnnnnnnnnnnnnnnnnnnnnnnnnnnnnnnnnnnnnnnnnnnnnnnnnnnnnnnnnnnnnnnnnnnnnnnnnnnnnnnnnnnnnnnnnnnnnnnnnnnnnnnnnnnnnnnnnnnnnaaaaaaaaaaaaaaaaaaacaagtaatataccttgatcaggtgtggaaccatcttcatagagtctagctaacttgaaatttacatcttcagctagtggctcaaggcctccactgctgtttgcagatgatgaataccttttacttttgaatctgttaacagttctgaagaatcagactaacattaatctaattcaacaagatcaaaactctcacctctttttgtccttgagatattcagatatgaagatggaatggacattgaaactataatgagcaattgaacactagaacaatattcaataggttataaattgaactaccttcccgaatcaaaatctgaatgtgaggcaggaccattttcagacgtcggtcttggaaaggaatgtacactgcctcctagaatatcacgtcgaagaacaattatcttgtattttcatagttatacgcatatgttagagaattcaaagatctaacaaacaaatcaataaaatataccagctttcccagatgagacctgaggagtagcttcatgccctctcaaaaggctagccgtcagttcatccatgaggatatgttcccgagccttctccattggaggtgcctggtagtctggcctactgtcaaaatcttcagaaggcttcacatttggacattttatcagaagtaagctacatttcctcctaaaataaagaaaaatcaaaccacaccaaaagatgctgcagaagactaacaaattgcatgaaatattcattttgtactcctggaggcgatgaaaatgatggttctggaggatggtgggctgaaatcctttctgcataaaattgagtttgttactttctgctaaaccttttccatataaaggttgattattttctcaataccattttaacaccccccaggcaccccagagagactctatgctgacctgaaggtgaatcatgaggtggttgaatgctcttaatccataagtcaagaataggttttggataatatatattgtctttttcagcagtaaataaatcaccaattagcacaacgggtggcagcttcatgtggttggctatctttgttgaagacataacatcagtttgctgcaacaagaagtaaaattttattgtgtatgttgttgaagatatagctggattactaattttatccgcttctcttgtcttttcttattttttatgatattaaactctcagctcagtacttttcctttaaaaaaatctggtttacaaaatatcatacatgatctgtctcttcgttgcctagctgataacatacatgaataagcatttcattcaaaaaccttggatgtaatatgcataatgaatatcaaatgaaaacctttttccttcttccccttcgtgagacaatgtcagaagcattctgaagccagtgttgatatatgtgagcaggaataatggtttgctcataatccatttcgacagccgatggttgtcctcttttccttttatttggtcctcgccttctaggctcctgttgcattgcactttggttggtcatttcttttctcatcaatcataatggtcactgtactattaaataattatggcacctgtctaggtatcatgccttcaataggttgctgaatgtctgggtgtccaggatgaaggtcttgaaacgtatcagctgcagaatagttatatgtcagcaaacaaattcatttctttctttttcctttttatattgacaatgtttagttatctctacaacatttctatactttaatatgtgcttgactctaaggaaaaaaaaaaaaactatatcttagaatattttcacagtaaataataatactgctgaaatgtagtctcataattactataataataataattcagtttctatgcaaagatgccctttacgagtcacaacttatgataccaagataaatttttactagtacgtcaccaactgaaaaaattacaattgcttaccttccactgtcatttgtcaattctgaacctcctctctagtgagaaaggtagagcaggaccaggagagatacacaggttgtatatgtaagcaatgcagtatggacactccataacttcaatccttaagctacagcctacatgtacaacactaggaatatgacgctccattactcccttacaatccttaagctatatgtacactttaagttgtagccaagctcaatcccacacaaatttccaagcttctaagttatgagtaggaatggaatttgatggagttgtcaaatcatactaaggttgggtcatgactgagtttggtctagatggtacagtactatcttccatcaaaaacccagtattgatataagctacatgagtagggtacacacaagggaaatgtggtggaagaaaaagaaatgcaattaaggtggaaggaaagacatgtatcaaaatctaccgatactttagatgacacaatgttaaaaagaaaaacaacattatttaaaaatcttaatgtttacaaatgattgttatcctaatcacctttggtgggttcgtcttgatgaggtggggagggtacaagcgtggttggaattttatctcctgaagttacatttacctgtgtttcctcatcttcttcaatatcaaacctgccacaacattcaaaaaaataaatggaatgttgcaagaaattaaaaacacgtatacaaataaaaaaggatgattgaaactaaaaacctctcaaagcgattgtacgtatccgtatgagcttggaatgtttcaaagcgttcaaataaggtaatattctctgcgtcaactgagaatgataagagttagcaaatggacacttgcatggactatacatatatatgtttagcaaactcaaggaagaaaaccttgatggagaagttctgattgatcttggtcctctcttgctccattattagtgaagggttcatccacattatcaagtcgctgcaataaacaaaagggtataatggatcaactcaaactaattggggatcaaacctagattaatttattgattagttcttttcgctttctaattccatgcagtgagaccaggtatataccatagtaaaataggcgttatgctggaatcctgttgcggtgcctgtgttggaaaactgaagggactgttcaatatctgctatgttcgtttcacctgtccctggcagagtaacagcctctttccttgaaaaaaaaaaaaaagaaggtaatacagagaacaagggaattaaatcattgaaaaaatgcatgacattactcattgagtcatgtagttatctaaaaggtaacgtatactatgcataatttgaataacaagagcaacaaaatgtgactaacttggccgtggatttggacttggggagcaatgtaggatctggagcagtctttactttccaggcttcgtttatctcaaccttttttacccataggaaagaaatgcagagaaatgtaaagaaacaagaaaccgaattcgtaggaaatgttaattaatgttgagctctataccagaaaacgggtcacgtcctctgcgagaaaacaaggtaaaattaaaaaataagtaatagaattcagaaacgtgagcactttgattttaatgctacactatcaatgaaaacaaggattcgaaagtttaccataaaggagcttcacttttctctcatagacaatcactactcctcctgaagaaacgcaacaaccattaagcagggacatggagatatcctacatttctaccaattaattgaaatggaaaatgagattcaagatcacggagcatcaaagagagcgagtgtgcacccatcagaattccagaaagtctaagagccataggaatcgatgggtttagaatctcttcgctgcacaagaaacaaaataaatataactctgcactactataagaaaaacatgcgttcaggtaagcaaccgctaccaaattttgatgatgttgagcttgtctagctttcttcggttaatcttcgcgtgcattgtcgcagccatccttcatcagggaccaagtgagaattcattcctcattttagaaataaacttccaagttaagggaaattgaaatccagaatcaccgataatgttacacggagacagaaaacaaattagaaaaagcattcgtaaattaaaacaacgatttaatttagttctacataagttcatcacattcaagtttgaagttccatgttcgatagatgctttaaagaaacgaagaaatggacaagcatggtgaccaaaattagaaaccagtgatctcagagaaaacagagtaccgttgaaatcatacttaaaacagatacaaaaacagaaataaaagcgtgaagcgaatagaaacggagttaccatatttggcctagtggtgcctttcgagcaagaagctggtgagagtaaaacatcttcaagccagtgagaaactcaactatctgtattcatcaaagtagcagagactcagtttatgttaaattcaaaaagatcaaagaaagaaagaaagaaagaagcgtttgaaaaagcagaactcactactctctattcgcttcgccttgcaaaactgtcaacccgccaaatgcaatatgtaatggcaatgcagcaagcaacaaacaaacacgccaatggtaacgaacgatgtagcaaaataagagctacccgagggtgcaccaaatcttccagtgccacaaagcatgactataacacgtgtcaatggcgtgacaatgtataatagtgtagtaggagtaggagtagtatagttttagcgcactcgtggctggctgttagggtaggctgcgcataatcaaagatttttttttctttcattctttccatcatggtgaggacaatgatgtgttacattaatatagttgtgtcttattgatttactttttatcaaatttgaattcggaaatagtttatttatttatatatgtaatgataaagttatttacaatattcttcttcctagttaaaaaggccgagttcggtgctaacacgtccgggtccactcaccccgagtcaatcaactcgtggttcgcctctcgccggtacgggttcaagactctggacatcaagctcaaggtggccttcgtgggcccactccttctcaacgacgccgtcacgcacggagatttagacgcggttaggaacttgattgaacgacagcgttccatgctcgcggatttgtcaccctcccaagccgagtcgctcctcggcgccgccaccaagctgcgcaaccaggacgacatggttcacctcctcctcgaagccggcttgtgtgagaataatcgccaaccccataatgcccctgatcaagtacacgtggcagatacagtacaaatacaaacataaatgtaagtcaatcccaagcccaaattaataggtctatcagacgattagacgtagtgtattgttgcttctctctaggattgatggaagtgtctaagatctgacatggagagttattgtaacgtccggctacttgcaggatcaacgactatccctacatatcaatataagacttttcagtgtgcattgtcctcactcacacacttcctgagaaacttcccaggaggtcacccatcccaagattccatgtactcctcccgctggtacctgccaggagccgctccttgtccgtgcctcactgcaccgacgatcactccccgcgttcgtcagcgcccgggatgttacatgcccaccagcttccgcctggttcgtcctcgaaccacaccgtactggtagagaggccttgctctgataccacttgtaacgtccgaccacttgcaggatcaacgactgtccctacataccaacacaagacttttcagtgtgctttgtcctcactcacacacttcctgagaaacttcctaggaggtcacccatcccaagattgctccaagtcaagcacgcttaactgtgaagttcttatgttataggctaccgaaaagtagatgcaccttgttggtataggtagtacctattaaatcctttaagttatcctcaactgtacagtcccatacctgcacagcctctggatccctctcgttcgggtgtgtattcgattcattcatgtaccccttccgctggtacctgccaggagccgctccttgtccgtgcctcactgcaccggcgatcactccccgcattcgtcagcgcccgggatgttacagttatcatcttttaacttacattagttggcatccatttattgttctatctcaataaaaattgatgacattttgtttatgctagtaggagtagttttttaatgcttacttcatttattgatttgctgatttttgtttgtttgttttacactagacattaccagcaattcaatggggaaagcataccagggttgttattaatgttggctctggtgttgctaactttggtggttatatgagctcaataggatcttagacctggcggtttctttgcatggtctgcaacaccagtttaccctgatgatgaaagagatcagaaagtatggaatggtttgtccttctctctttttctcttacctcaattgagtctatttatgtcattgtctctccttcctctgtagttaaaaatcctcaatctgtgttgagcacgtatgttttttaattaatttaatgcatggagatgttgaatttctgtatgacccaatcatggtgctgcaaacaaatttgctctgtcttagctcttatgtttaagaaaaatgtatttttttttcaaactgcagccatgtgctggaaggttgtggctaaggctcgtgattcttctggaattggacttgttatatacccgaagccagccttatcttgctacgagaaatgtaaagagaacaatcctcctttatgtgaaaataaagaatgggaagaatagctcatgatattttatatctctcgcgtcttatttctatgatgtttatatttccatcaattatattttctccacaataccaacatgaaagaaatgaatattgtcccttaaaaaatgccatagataatgtgcatgtattgcaagcaatgctagatattactgttttgtctaatttccacctttgcttattttgtttgcatgcttgtatttaggtatgccagactcaatagttgtctcactcctcttccggttgatggtatgggtaacctgcagagctggcccaagccttggccccagaggcttaccagtaagcaaccaaggttacctactgattcagatgccaagggcaagttcttcaaggacagcaaacgctggtctgaattagtttcagacgtttatgtgaatggtctttcaatgtcaagtgttcaaaatgtaatggacatgaatgctggttatacaaggtaaagtaattttgttattgattttctttactcactttttcctttacattctttatggtagaatatggaccattttgagggcatcggtagtatttacccatatacttgatctgtttttcagacctacgtacatatggttcaaattcaataattgcatgtcaatcttctgtgacatgtacatttacattatctgttattgcatcaacataaattgaccagtttcctccaagtttctttctttgaaactgataccgactctgttatttccagatttgccgctgctctcattgatctaccagtctgggtggtgattgtagtacctattgatgtgacagatactctgttagtggaaacgatccgaaggtgatgaatgtgtagggatcttcttaaattttgctgtgctataatagttttttgtaaaacctttttttaacggatttaaaagcatataacacagtactagttgattaacttttggacattttttaaaagagctggattagtcttgaaaattatatagcatggtcattattatttttttagaaaatagctaaattgacctttgaatagatgcgacattatagcacaagtcatattaatccctaaaaaatatagaaataatcacataagttcacgaaatgtgtattttgtgaactaaattactgcttgtttgattcaccttttgaagcaaagtttccaattatatcattttcatcacttaacattgtgcttaaaaagaatacgtgaaagttgcccatgttgaattgcattgctctattacaattgattgttaaaggagttataaggcttgctcctggtggttgaaggaagaaggaatgaggaagatgtcatgagtatcatttccaccaagaatggatccaaaaatattttataatggaggcaaaaaataccagtttgtaatattttcaaagaaaaatatcaattttaaatttttacaaaatatataatctcatggtaaaaaaaattaaattatttaagcatctaaaaattacaattggatcaatgtgtgtgtttatgtcacttatttgtttaaaagataaaataataaaattagtatcaatttattgtctcttttatctcttataattatttatatttatttgtaaaaacagtttaatattatgggggcaatatttgttttttatggggataaaaaaattatcagataagaaaaaaatattttagtgggggcaattgctcccatggaaaggtggatctgtccttgatttttactaatgaaaattaacaattaacattaatcaataaaaaaagagtattgctaagtatcatctaatatgttctaaagataaatttgatctttagtttcaaatgatagcttatgtgtttaaaaattaatttaaactcacatcccattatatataagcaaacttatgtgtttaaaattaatctaaacttacattccattatatataagcattgttctctccaaattctttttgtacaagttgttttacttctcgcatgctctgatctccttctttatccgagatgttcgagttagtctttgtttgagatatctagagtgtattgttgtgatactatgattttgatactaccaaattatcccctatttaggatgagtgagttattgtatatcccaaccctctcagtcagcatttgggagggtcctgtttcagctttatgatatttggtattttcggacgtcggtcgttggcgtcaccgttgacccgcctcatcgtatgcaacattcgatccttaaccgcttagtagttttaatcacctgcaatatgtgcccaggaatatggggataatggatgagatcgtgcataataaaccttggcgagaatatcgattgattaactattatgcgttcgtatataagcactaacacttgacctaatgagacagcttgattttgacacaaaacacttaaatattctttaactagatctttttttctctaagacacaatccaactataaagacacttatcagatagataactttcctaaaccatttgttatttagaactgccattgatacaaagtcttttttcatatatgcataaaacacaaacatcacacatgcattgcacattgaaatgaaaatacttttaattcaatataaacaactatacatctgaattttatgaaaattgatgaaccagccacatcaataataatatcaaggcaatcataataattaagataaatatgttttaattctttaatttgtggttaaaattgaaattagcccaatagccttaaaaatgattttagtttttttatttttttataattaatgaatttcattcctagtctaacattttaagttctgtaaaaagagatagaattttctgattataaaattatgaaactcaaaatcgtcattttaaaattaaaaaaaatactaaaaagagataaaattttataattacaacccattagcatcagcctgatatatatgaggtcatggattcaaatgttagtgtgaccattatacaatgtataaaataataacaattttaacagaatatctcaaagaaaaaaacaattttaacagaaatttgactaacacacgttttaccctaataattacaataagtaataatcctagcgtcagttgtttgttggtgtccatttttcttatcctttttggtcagattcctcctgcataaatcagggtttggtcttcggcttttgcagaatgtgagacacgacacgacattgttctaacgttgacattaaaaccttaacatgttcggagacagcgtttaaccacagtaatctcacaattaaagtcaccataaatctaattttctttaattaaaatttatgttttactatataatagcacgaaccttcgttgtatttcgtaagatcctgctaaacaaaacaaagcacaacgctgccattgtcagtgtcaacgcgtcggttcgaaagtttgagaacctaggattgagttgaagctgcgttctgaatacagaatctgaccaccaaagtacagagtctttaggatccgaaggacaaccacaagatccagttattccttcttcctcgtaaacccgtgtgtatctctatctttgtctcccttgagcagagtgaaaaaacaaaatggcaattttagctgaagacttcttcaaggagagaaaataccctttcattctcactctcttaatcttgctcatttgcgtcacgctcttcctcttcagcttcaaccacaccacctcaaacgctgttgctttctattctgttatccaagagaaaccaccccttaacccttcccaagcatctgctgattatactgcaaatccaaaagagcaagagcttccaccaaacatgaccaatgtgagcttcgattggaagctatgtgaggaaccgcagaatattgattttattccctgtttggataattttaaggcgattaaggctcttaagtcgagaaggcacatggagcacagggaaaggcattgtcctgagacaagtctgcattgtttgcttccccttcccaaaggctataaagccccagttccatggcccaagagcagggacaaggtgagattgatgagaattgaataggttttgctttatgatatgtcacataccaatttcttcttacatacttatgaaaatggtgtgttgattgttattagttaagtattctgagttttacttttatctagtcttgaaatcagtggagaaggaaaccttttatttttttatttttttcagatttggtatgataacgtcccttattcaaagctggtggagtacaagaaagaccaacactgggtagtgaagtctgggaaatatctggtctttccaggtggcggtactcagttcaaagatggggttgatcattatattaagttcatagagaaggtatgctgtcatctggattcacataatttagtaccataattatgatacacgctttaagcctttaatcttttattctccatgtgactgttatagttactgagaaactgtaatcaactactaaaaaagagccgaaaaatgaaaataaaaataaaataaaattcggaggacatggagagtactgagaaggaacctgactactgtttggatcttgcttggcctacatattgatattatatgaacacatcaaaaaagctcagggattataattaggaatgttaggcaggagcagtaggtatatattctgatagaatactgaggctgaatttttttttttgcttagtgctgttagacgtagtgctttgttgcttctctctaggattgatggaagtgtctaagatctcagataaagagttggcattttttaacttacagtagttggcatccatttattgttttatccaataaaaaatgatgacattttgttaaattttattttaatgagtgccaaacaatgtttcattttgatttatgtatgacttaaaccagtacattacatatgttatactcgaaggactaatttttgaatgcttacttcatcttgtggtttgctgattatttttttttgttttttgttttacactagacattacctgcaattaagtggggaaagcatatcagggttgttctagatgttggctgtggtgttgctagctttggtggctatctgctggacaaaaatgttattactatgtcatttgccccaaaagatgaacatgaagctcagatacaatttgctttggaacgaggaattccggcaactctttctgtcattggaacacaaaagttgacttttcccgataatgggtttgatttgatccattgtgcgcgatgcagggttcactgggatgcagatggtacttatcttcttttcttgtttccatcaagatggggttctataattgccttccatgttccatttatattgatctctgagaaatgtttattcacaaatctgatcacaactttaggtgggaagcccttatatgagctcaataggattcttagaccaggcggtttctttgcatggtctgcaacaccagtttaccgtgatgatgaaagagatcagaaagtatggaatggtttgtctttctcttttactctcacctcaaccctgtctatttatgtcaatgtctctccttcctttgtagttaaaaatctttcatctgtgttgagaatgtatcttactgaatacatgaagatgttgaatttctgtatgaccctgtcataatgctccaaacaaatttgttctgtcttcttatgtttaagaaaaataatttctttttcaaactgcagccatggtggatataacaaaatccatgtgctggaaggttgtggctaagggtcgtgattcatctggaattggacttgttatataccaaaagccaacctcatcttcttgctatgagaaacgtgaagagaagaatcctcctttatgtgaaaataaggatggcaagaatagctcatggtattttgtctcttctcgggattttatttatatgatgtttatatttcctcctgtttatactttctccacaatgcctgaaagaaatgaatattgtccctacaaaaaggccatagaaaatgtgcatggaccatggaaagcaatgctagatattacaatgtttagtctaatttctaccttcgcttattttctttgcatgcttatatttaggtatgccagactggatagttgtcttactcctcttccggtggatggtatgggtaacctgcagagctggcccaagccttggccccagaggcttaccagtaagccacctagcttacctactgattcagatgccaaggacaagttcttcaaagacagcaaacgctggtctgaattagtttcagacttttatatgaatggtctttcaataaagtggtcaagtgttcgaaatgtaatggacatgaatgcgggttatgcagggtaaagtaattttgttaattttttttgctcttttcccttttattatattctttatagtagaatatgggcaattttgagggcattggtagtatttactcatatacttgatctgtctttcagacctacatatgaatcaataatggcatgtcaatcgtctgtggcattcaataaattggctggcttcctccaagcaactttgaaactgataccaagtctgttatttgcagatttgccacagctctcattgacctaccagtctgggtgatgaatgtagtaccgattgatgtgccagatactctttctattataatggacagagggttaataggaatgtatcatgattggtgcgagtcctttaacacctatcctcgcacatacgatcttcttcattctagctttcttttcaaatatcttgagcaaaggtatgcttattgaggaaactaatacctataagatcacgtgatttctccttttatttattgttttagaactctctcgacttacttctacacgtagcataggtatttgttaagagacatatgaatctgataatgaacatttttttggtcagatgtgacattctagatgtggctgtggagattgatcgcatattgagaccaaatggatatcttgtggttcaagattctatggaaatacttaacaagctcattccaatcttgcgttcacttcactggtctgtaacgttgcatcaaaatcagtttcttgtaggtagaaaaggtttatggcgtcctacgagctcttgaaactgaatgtatatcaggttaataaaaatgacgtattcttcaatcacccatgtatcagtatattctggataaaaattaggtgtaaaaagaatgaattttaagaaaggaatatttattcgacaaggaaatcttgtctgagtgtgaagtatgttaacgagacatttattagaaatgttagttttttttctacaaatgttaattttttatttttattaaaaatgttagtagggggatttgaactcttcacttctctctcttctcttatatcttcttttttaatcattggactaatcttatatctcgtgaaaacttatgaatgatgcatttacctttaccataacttctgcatgcaatagttaaaagtagtttcgttcatgcacttgttagcacaagaaccaatatagcatgcagaacatgttacgaaaatgtcaatttttttactctattctttgttttcaaaagtatggatattttttttaaaaagcaaaataatttcattgatcaaaagtgaaagcttaacctccaaaacacaagccgtgttttaaagaacagctcctccccaagataatacagcttccagaagcttcaaagtttggatataaaatagtgaaaaacaaagtaaaactagaaaaatgaaaatagattttcattatttattttactaaatttattgtctattttcattttcttttttcattatttttgtacaaacttttgagaaatgagaaaaaagtaaaaatacaaatagattttcttaagccaacaatccttaggcttttgttatggacttgcatgaatggcctctaaggccacgaaaagcataattcttgaagctgaaaattgctcgtctgcaagctctactctgctacgagccatacatttatgatatgatctttgtttactaaccgtgggttcagtagcttgtgccttccttcagtgtctactgtctagatccaggcacagtggcacgtatggaaacaatacatacattatgcagattcaaaagatactatcatacagattccttcccctagaannnnnnnnnnnnnnnnnnnnnnnnnnnnnnnnnnnnnnnnnnnnnnnnnnnnnnnnnnnnnnnnnnnnnnnnnnnnnnnnnnnnnnnnnnnnnnnnnnnnnnnnnnnnnnnnnnnnnnnnnnnnnnnnnnnnnnnnnnnnnnnnnnnnnnnnnnnnnnnnnnnnnnnnnnnnnnnnnnnnnnnnnnnnnnnnnnnnnnnnnnnnnnnnnnnnnnnnnnnnnnnnnnnnnnnnnnnnnnnnnnnnnnnnnnnnnnnnnnnnnnnnnnnnnnnnnnnnnnnnnnnnnnnnnnnnnnnnnnnnnnnnnnnnnnnnnnnnnnnnnnnnnnnnnnnnnnnnnnnnnnnnnnnnnnnnnnnnnnnnnnnnnnnnnnnnnnnnnnnnnnnnnnnnnnnnnnnnnnnnnnnnnnnnnnnnnnnnnnnnnnnnnnnnnnnnnnnnnnnnnnnnnnnnnnnnnnnnnnnnnnnnnnnnnnnnnnnnnnnnnnnnnnnnnnnnnnnnnnnnnnnnnnnnnnnnnnnnnnnnnnnnnnnnnnnnnnnnnnnnnnnnnnnnnnnnnnnnnnnnnnnnnnnnnnnnnnnnnnnnnnnnnnnnnnnnnnnnnnnnnnnnnnnnnnnnnnnnnnnnnnnnnnnnnnnnnnnnnnnnnnnnnnnnnnnnnnnnnnnnnnnnnnnnnnnnnnnnnnnnnnnnnnnnnnnnnnnnnnnnnnnnnnnnnnnnnnnnnnnnnnnnnnnnnnnnnnnnnnnnnnnnnnnnnnnnnnnnnnnnnnnnnnnnnnnnnnnnnnnnnnnnnnnnnnnnnnnnnnnnnnnnnnnnnnnnnnnnnnnnnnnnnnnnnnnnnnnnnnnnnnnnnnnnnnnnnnnnnnnnnnnnnnnnnnnnnnnnnnnnnnnnnnnnnnnnnnnnnnnnnnnnnnnnnnnnnnnnnnnnnnnnnnnnnnnnnnnnnnnnnnnnnnnnnnnnnnnnnnnnnnnnnnnnnnnnnnnnnnnnnnnnnnnnnnaaaaaaaaaaaaaaaaaaaaaaacctatgcaggaaactacataataaatagatgtacggaaaaaagaaactacaaagaattttcacaattcacagacaaaagttgaattgtccgcaacgaccctgccattagtcgcagcaacattccttgagtagcaagtgaacctatcaaaataactgtaattctgggaggtgcttgcttgacccgaaacaacagagtgacccttaacctcgatccacccctttgaattctgctcattactaatcgatttgacgaagcacccactcacatgcttctcctttagagtgtgagaaagatcagtgacaagcctataagtcccatcctgaaactgcttagtgtttgtgacaacccttaaagggtacctcctcctaaccttcaacctagtaatcgattcgccttttccatcgatcaccttaaccttcttcttggccttgaacttctgcttaacggtcttgatactcccgttgtgttggaactttatggagttcttaaacgagaagccctgagaaacagtggtggtgatgttgcccacactagtcataacccaccctgtgatctgcgtttccttctctgcgtccacaccaaaggccccatcaagccctttaaagtcctcttgccgttcgattgaagtttcaggactgtgatgaaccacagggtttgcatgaaccaccgtggattcatgatccaaccaaagatgcaaatttgcgttcagaagccagtaagagattcccttcaccaccccaattccaaagacgtgctctttcccgtccaaaaccttccccaaaaacggcgtcaaatcgatgtcatatgagggaaggtcaaaggccccaatcgccaccattggttcccagaacagagggtttatcccgccggcgaagatcaccggaaacggaatctcccatccaacaacctggccgtcgatcgtcacgtacacttccctgtacgcgccgttaccacgctccgtttctaaaccgttcgccgcgatgtacgaattcggcgggttggagtaccaaaactcgtcgtttccgtggaaagaaacgtataactcaagcaccgcgcggtaagtgttcctcggaattcgaattctccgggaaccagaacctttttcttcctccaatttgaaccagaaccctcgccgtccgtcgtcggagatcggaataatcaaatcagccggcgattcgttcacgcctctggagcccggttcctgaacaagagatcgagatcgtgatctcgattgaattggatcaaaattgagtgcctcggggcacgggacaaacggaaccctaacgggagctctaacggcgtacttgttgtagaacaaaagagtgacggtgacgtggtagacaccggtgaatttgttattgacaatgttttcgagcatcatggtgaggtcttggttgggcttggcgaggagggcggagtatttggtgacgtccttgtggacgttccagaagatgccggcggggctgggctcggcggtgctggtgcggaggatctcggcgccggcgagccagatggcggcaatgcggtcgtactgctcgcccttgcaccgcgcgtggaagtggaggaccacccgagaccacggtgccccgcaccgcgggggcggtgtgtaagaggtggtgtacggtggagaatcgatggtgttggcgaaggcgtggtggattattcggtgggtgcatgaaggtgttatgggttcgtgtgagtttggagggtaactcacttcgaagtattcttggtgagaaccactaaggggtttgcgtctcatgaaatggtctggttgggactctgataaggttgtcaccaagaggaagagtatggagcagaggaaggtggtggtcatcttgttgtttgttgtgttgtgttgaacaatggcacactgtaacactttttttttttcaataactaaataactaacctcttaagatgattcatggttaggaaatcatattcaaacgtgaaatgaagctgaattcgggttaaaaccctggagaactttggatactgggtagattgcttaatttacaatttgattaaaaatggcattatatatataatggagttcggtactacaaaataaggaaatttcttggtcgtgtttttcttatcagcatcctacccaaagtaaactccgcgtgcacttcttccattccattgcaagtgttgccacatcaaaaataacaaactaaacttcaattatgaaaattgaccttatttaattgctctacttttatgtcataataatagtaaagtgataaagatgatttttattattttttgggccaaaaaatgtagaagagtgggtaaattttatacactcaaaggtaattcaggaaaactgtgaaagtgccaatgaccttaacaaacagataaaacagagacaatagtttgagtgtaacgtattggacacacatttccaattccagagatctttttagtcgctcgtgtataacgaaagcatattgacactgtcatacaatatattcaaattagagattgaaaagattaaccaccacccgccccaaaataataaaggttgtgctttccatttgcttctccactctaccaaaaagatttggtcaatctgtgatctcaaaaccctggttcttctacacatcaatgtcccctattcttatcttcttcctcacaatcttcaccaccacttaccaccgcattgtcttggcatagctttgtcatgtgttcggcaagaaaaatatcaccatgttcactcacctgaatcacaatgtagtgccaaaaccatcaaatcaaccaaaaaaaaaagaagtataattctactctaaatctgcactatattaaaagatagaagaaagcatggcagatggagtattagtgtattggcaaaacatatagagaatgtcgtaaaatgatatatattagaatttagaaaaccaaaattcagtcaaatatagaaaatattgacaccctgctcttggcgcatccttcacaagtttacccttgtcagttgtgttgttctattgacgcaaacagaagcaacattgttgacaacaagtattccttgcaactgtccagaccatatcaaaaagttactgcttacacttttagatgcaattctacaagactacaactgccttacttctacttgatagtggataagatatgagatttaggtgggaaagagaaaggagggaagaagcacaaaacataacagaatgatagagagagacagacatcaaagaactgagtattccaatctttctaaaatacaacagtcatgctttagttttaggcagctacccaacatatatcaaaatcctaactaacagtacctgactaactaacattattttcttgtttatttttacataacaagatactggatattgtctagtctgaagtatctactactctactgtcttaacagttggattgtcagaagggagatatcttctaataacaagtgcaattacaatctctgcaaaggtggcatttgcttaagtaaccacaacttttaaagttatcagcatagcctgcataggacatgaatgatatattttttggtctagtacaaataaatattcagtagcagataccaagagtttacctaccatatcaaccacatcctccatgttagtaaccgagtgagagatagctgtaggttgggggtacatctgatacttgattagttggtaggataaacagacacctttaagtagtattcagaaacacaaacatccatatgtttgacttctgaaatgtatacccccttagattttttactttgatcacttttgaaaaccagcaaatactactaatagtaatttgtaacacaataattaagggatataaaaggcaaatcaggaacctctaagtacaaagtgcactttagacagtagtagagtacaagggggggtgtctattaccactccaagatgtctattgttacttctattcaagtaatttttgtctaaaatactcttttcatctttgttaaatgttaatcaaattaataataagggtatttaaatgaaaaattgatagataggagtggcaacagacacatgaaaggggcaatggacactcccaaaacaagttataaattctcattagaaaatccagagtaaattcccaaaagtctatgactttgtttatttatccatgtgcttgcattagatgttataaaaatgtttttttctgaatgcaagatgttataaagagctaaagcagtccgatagaagtcagtggctttgattgtttaatggagctgacaccacctaataggatagttagtagtagcacttgtatttattttcccatcaatttccgccaagttagggtttagaggggaaaatgatcataaaaaaatcgcccaccgtggggctcgaacccacgaccacaaggttaagagccttgcgctctaccaactgagctagacgggcttcttataataaattttttattatttgtaatactatttatgtttcacttgaagatatagtttaacggatgtagttcttttgggtaaaggaataaaatttttattttattttatatatcttcattttttttcaatgtttttatgtttcatattgttggagagaaaatcctttgcacacacactcacatatatgaacaagagaataaatttcaaaaaaaacttgtatatttttttctcttgcatttacacatgtacctcttatatagtgttttttatctcaaagttaattacaatataaatatcaaaattaattatcctttaataatctaattaattcctaattgtgttctacttatatttggattaaaactcaacactcatacttaatccaaatcattacaagatacaatttccaacttccttctcagttttacaaatctattaggcctaattgtcttagttagtatgtcagctgaatttctgttaagcgtatgtcacttcaagttttccattattcacatacgtccttaggaaatgaaatatgattttaatgtacttatttttcccatgtgagactggatttttagttaaattgatggctgatttgttatcaattatcaatttaatgtgtttttctacttcaaatttcaattcatctagcaatgaatttagccaaatagtttggcaagcagcatatgagcttgctatatattcaacctcacaagaagaaaagaccaccataggttatttcttagaacaaactaaatgttgacaactaaacacgagggttgtgggacttagtccaacaccttaaagcacgagttgacgacaaccatgcaccacctctttcaagagaattcacgtcaagaaattggagcacctataaacttgaacaaatatccaatagtgagaatagtatatataacaattgtcttgattaaatgaccatttttttacaacggataagaggtatttaaaatttcttatttgatacttaactaattttcatctcatcgaattagactatttttgataaaataataccttagatgtgactttgtgtctaaatgaaggatttttctattaaaattttaataacaaagaaaaagtcactagcaatggcctactatacataataatgtcaatctcaccaattttacaattttgaaagaataaaaaccaaaataacctaaataagaaatacttaatgtagtttaattattaaatttgtttgctctaaaataagggtttttttccgaaagaataaaataagggttgaatctagacaataaaacatttttataattattcattaaaaaaagttgcaattaaaatttgaatttcattatttattatacatatacacatattttttgacaattttaattactaatttgaaaacaataatcataaacatatacttatcctaaaccaaatgataacattgggaaaaactgtattaatgaaagcgtaatctcattattggtataggccccatagttatagtttatgactcgaatgtgatcaatttaaaaannnnnnnnnnnnnnnnnnnnnnnnnnnnnnnnnnnnnnnnnnnnnnnnnnnnnnnnnnnnnnnnnnnnnnnnnnnnnnnnnnnnnnnnnnnnnnnnnnnnnnnnnnnnnnnnnnnnnnnnnnnnnnnnnnnnnnnnnnnnnnnnnnnnnnnnnnnnnnnnnnnnnnnnnnnnnnnnnnnnnnnnnnnnnnnnnnnnnnnnnnnnnnnnnnnnnnnnnnnnnnnnnnnnnnnnnnnnnnnnnnnnnnnnnnnnnnnnnnnnnnnnnnnnnnnnnnnnnnnnnnnnnnnnnnnnnnnnnnnnnnnnnnnnnnnnnnnnnnnnnnnnnnnnnnnnnnnnnnnnnnnnnnnnnnnnnnnnnnnnnnnnnnnnnnnnnnnnnnnnnnnnnnnnnnnnnnnnnnnnnnnnnnnnnnnnnnnnnnnnnnnnnnnnnnnnnnnnnnnnnnnnnnnnnnnnnnnnnnnnnnnnnnnnnnnnnnnnnnnnnnnnnnnnnnnnnnnnnnnnnnnnnnnnnnnnnnnnnnnnnnnnnnnnnnnnnnnnnnnnnnnnnnnnnnnnnnnnnnaaaaaaaacactcaaatgtgactcaaatgggcatttgtcttctgacaaagaaaaggaatatgggcctttaaggaccatgatccagcacttctaaggattagggtttcttttcatcaacctctcaccttaagtgccgcagcaactcattctgtttcttcattttggtataactttagccgaggtccagaggagtactagctaggttcacaatttcaaaatggttcgtattcttacctttcttctgattttgatgcattctcaagtttatcttcataataggtttcgatcttcatcgtcctttgagcattttactccaattaaatcttcattttttcatgaaatagcgcttggttttctgcaatcagagtgtcactatgtgtttacgcttcagatcacatgcttcaattcacgatatcatgactatttgtttgataatgaattcgtgcctttgaagagtctacatttggattctttagatttcactctgtgaaggatgcactgcattttttggatttagctggactaaacttgtgttttggatataatttgttctttctgttttttttatccatctcgcggatccattgatactaccctagggttttgttcatttaatgttagacttgctgtttggatttttttttaatttgtgtttagagttttaaacttttgtgcttatgactgttacaggctagggggctaaagaagcatttgaaaaggctcaatgctcctaagcattggatgcttgacaaactgggtggtgcatttgtaagtggaaatttaatcattttttaaccagttttgaagggtattattttaaagactgatgaacctttttcatcctgtataggcgcctaaaccctcatctggaccacacaaatcgagggagtgcctccccctcattcttatcctgcgaaaccggctgaagtatgctctgacataccgtgaagtcattgctattctgatgcagcgacatgttcttgtcgatggcaaagtcaggactgacaagacttaccctgccggtttcatgggtatgtttgcagcttgtcaatttttagaataactgcctgtttcatgttatgcagccaaaatatgttacagtatgagggggtaataatatgctaaagttacttattgtttattgagcttgactaattctgaatctgatgtttttaacaaactctcttgaagtctaggtagctggatattttatatatatatatatatatatatatatatatatccaggactttgaatggaaagttagatattaactgattctcagcttttcatgttctaagaatatagtcttttcctctgtgagaattacagacattgtaaatgttaacccttatttctaacattctccagtggcgtgtgaattgactatggtaaaatgtgagcttgaatttagctaaccaaattagttgcagaaacaatttttggctgtcaggctatacttacctcctgtccgaactccggattagtcaggttgtcccattcccccgatgtattggagggttaagacaaaaaataatagttgcagaagcttccaccaggctctctcccccctctcccccgccgaaaactctttttgtctgtcccaatatgtttctatagttatattgatttagcccgaggaatgatttcttttttaattttatctctatacagatgttgtttcaatcccaaaaacaaatgagaacttccgcctgctctatgacactaaaggccgattccgtcttcattctgtcagggatgatgaggccaaggtactttttatatggtttatattgaatattgtgattcatttgcagcctaggtgctattatactattattatgtaataatacagtatataattgactgtagctttgctgtgtttagttatcttgtatggaggctaacaaatgtgttgatgctattgaaccttttaaatgtcaatttcaggacttgtatagttttttattttattttattttggagttacaatttttcctacttaatggttatggtttaacatatattctttatatgttgtgtaaatggcagttcaagctctgcaaggttaggtcagtgcagtttggccagaaaggtatcccatacctaaacacctatgatggtcgcaccatccgttacccagaccctctcatcagggccaatgacaccgttaagctggatctggaggaaaacaagattgtcgattttatcaaatttgatgttgggaatgtagttatggtaacaggtggaagaaacagggggcgtgttggagtgatcaagaacagggagaagcataagggtagcttcgagacaattcacgtgcaggattccactgggcacgaatttgctactcgtatgggcaatgtgttcactattggcaaggggacaaagccatggatatcactgcccaagggtaagggtattaagctatcaatcattgaagaagctaggaaaaggattgccgcccagcaagcaactgctgcctaaaccccttttggatgaatagacttgagtgcttggtggttttattcaatgtttttgttttctaatttcttttgtctaagtttttaatcgttgaattttgactcttgcactatacaactttattgtggctgtgttatcttcatgaagtaatctttctattccctagttttttacttggtttttggtcgtcgtacaaaatcactgaatcaattgcaccataacaaaatgccgtgccgcagctgtagtaagatggtatttagggatgtttacgggtacgggtcatccgtaaattcgaactgtttgggttgggtcatttacgtgtttgggtcaaaatcgaattgaaccaatcaaaatcgatcatgtatggattgggtcatgggtttagatttatagatctgttgactcgttaacccgatctgtgaactcgtaataataatataaattttattatttatatatatatatatatatattaaaaattactttttttctctcgtttagcatatgattcaattaatttattttttttgtaaaaaatttaatagaaacaacattttatttgttattgtatttggacaaaataattaataattttaggcagtaataacattgtagtacaataaattttttatagttttggttttttaactcaatcagaaactgattcagcaatatgtactagaacatctcattttttattctagtagcaattaagttaattctagtacattggcttcaaacatgtctcataacataatgatgataaaggtgataaggatgatgattgagatgatgaatttagaatgaaaatcaagaaaaaacagggtgtggtgcaaaaaaatgagttagataggtatttggaggatgatgttgaaactgatcaccttgagtttgacattttgaattggtggaaattgaaggcatccaaatattatattttttcctatatggttagagatatattgatcattcttgtatctactttattatctgagtctgcatttagtatagggggtaaaattctatattcatttcgtagttccttgagtcttaatactgttgaagctctcacttgtgtccaaaattggattagatctactaagcaaaatcttaatgacttgcaagttaaaataaatgaagcggaaaagattgaatcaggtgtgtaatcctttattttattttttatatttgtataaaatatcaattaatttttgcgctaacgatggggttgtgtttaaatttttagagttgttttgcttgactttaaatattgctaatattaggtctccaagtattgaaactgcaagtgttggaacttcttaatgtattactttcaggtatattattatttgtttcacctttgttttcatattttgtttaccgtgtttataatattaatgaatcatattttattcatttgtttgtttcagcaaatctagttacaacaaatttggttataacaaagcttagtttgtaagaaatagttgtgatttagactattatagtaaatcttattcaagaatcttttgttttaatttatattataagtctattttagaatattatgttgatgatattaaatgaatcaattttactactttcatacatttgataatattgtgttgattgtattggatatttgaaagaatcatgatataaaatagtagttctatgaaaaaaaattaaatggataaccagttgaaccgaaccgaaccgatcatgaacgggttgggttgggttgggttttaattatttttttttctaaaaatcaaaccaaatcgaacctatcaaatttgattgggttgagtcctaaatttggtcaaaactgatccaaactgacccacgaatacccgtaatggtattgcttgctattgaagagaatatggatgtttatttgcgtgttttagtaatgattcaatgcacctcattgtttgaaggagttcttttaaattgttgatttgttgtccgacttaaaaggaaatgctattaacacatttttaacatattcttttgatttgaacacattctcgacatttgcttttttagtccctctccttgtatgtgtcaaactaaaaatattgaatatgcaatttcagtcgacctttggttgttagaatttgatttttaaaattctaaaattaaattctggtggtcaaccaccataatttttaatttttgtgtaagccgcaataaattgtgaataagcatttcataagtttgaatgattaagaaaaataattttaatttgagggattaaaaatatttataataagaaacgaaaagcatatttaagtgatttagcctcctcaaatatctaatgaacgaatacacgctaataagtttataataggcacttccactattgtttcctacattgtcaatgtattatggaaagctaattcaaaatataacgggataatgtagaatgcaatagtgggagtgtacagcatgaagggtttttgtccctaatattcattaagaaaaagtgcagaggagttgggtctcgttagttaattttgggtcaaactcatttgggtcttgagttacttcaaatgtagtcactcaaaaattaaggttaaaattgaaattaaaaaagtaaaaaataaacagcaccgtcaatattgcccttataaaaaaatttccaatactacacaatttacacaacaaaaaataaataatctcaataaaataataaaaatgaaaattgaatttaattatataattgtgatgaacataaaaaacatagatatcctgtctaatcagccaactgcaaccttttattatcattattataaaaactgttatattataaatgaattatattggtgtaattttgataattattatacaattttataattttcaactgaataatattttcttaaaatttactattgattaaaagttcttttcacttaccatatatgtaaaatttcatattattctaaaattatttattatcttatttatataaattaaaattgacgtaatataaacatttcaaaatatactaaaatatggatcatttgattatcttattgttcaattttgataaaatttggcacaaataattttggtaacatgtagatataatttaacggttgaattaataaaaatcacattttatatcaagttataaaaatgatgtaatagttattaaagttacactgattnnnnnnnnnnnnnnnnnnnnnnnnnnnnnnnnnnnnnnnnnnnnnnnnnnnnnnnnnnnnnnnnnnnnnnnnnnnnnnnnnnnnnnnnnnnnnnnnnnnnnnnnnnnnnnnnnnnnnnnnnnnnnnnnnnnnnnnnnnnnnnnnnnnnnnnnnnnnnnnnnnnnnnnnnnnnnnnnnnnnnnnnnnnnnnnnnnnnnnnnnnnnnnnnnnnnnnnnnnnnnnnnnnnnnnnnnnnnnnnnnnnnnnnnnnnnnnntaaataaagaaaatatttgcactcaaaagtaataaatgctttgactttatcatccttatctctttagtaatattttttctaaaaaaaatgttcccatttatttcatatatatatatatataaaggattgtaggttatgaacctgattcctgtgagtcaaccttggctgatacacctatttattataactttgcaatttatgctcttaatcaccaaatatcgttgcttagccttattgcatccctagccatagataaacttattatttagttatgggtcaacttgcaatgtaaatgcatgcatatttgctggtgtagggatttctatttgttttatcatcttctatgatgagaagggagagtaattaataaaataaaataaaagtttcctgctatttatttttggggtgttacaccatcatcttttcttgtttatgtaccacatgtttattgagataggttttgccttctttttttctgaatacccagttctaaatagaggaatgtttaggaaagactgagccacatgtgttttgtctaatttgcctttgcaatggtgaacaaacaccatctctcacaacttccatgagcagcaaccatttgaatcactgagattgcaccatgaccaaaaccgtagctagcactttcttgccttccaggcttccagcccttgagtcctgcacactgagacgcaccatggctcagattccacacgacaaaaacatgagccaatcaccaaagttcaaggagtaacttattatgcttcactcatttacggagcaaaacattaaactatttaaaaatatttaaataaaagaaacatgtttatttctttacaaggagggaaataataatcacttgagtcacttctgtatgccttgaaagagttagattccgactatcaattaagaaaatattaaataaaataatatttgcattttaaagtaataaccttatttctaaaataatatcattataatatcgaattttcttgcaatgttgcgtggacaaaagtaattaattactttttaaaaaaaataatcaatatattaattatttcattgaaaataatgatagtgatgacaatgacaaaaataataaataaagctgatgacgcttgttagaagtaatggtgataatagtaatgataatgatgatagtaaagatcaaaatggtattattttatgtgttgaaggagagattataagaagtgaatctattaaataaataagaaatgaataattttttatttgaaaaaatcattaccaattaatatatttatcttttttataaaaacaagtaataaattactctattgtgtacaacattggacacgttagatagaccattattataatttagacaaaaaaatgttttcatttatttcatataaaggagtgaatataatattttctcatttcaaggattttattaggaatattgtaaaaatatttccttaaatattagatatataatataataaaatgtaattaaatattttcttattttaagggtcttgttaatgaacaccgtaacaatatttcctttaatattagagtaacatgtaattaacgattnnnnnnnnnnnnnnnnnnnnnnnnnnnnnnnnnnnnnnnnnnnnnnnnnnnnnnnnnnnnnnnnnnnnnnnnnnnnnnnnnnnnnnnnnnnnnnnnnnnnnnnnnnnnnnnnnnnnnnnnnnnnnnnnnnnnnnnnnnnnnnnnnnnnnnnnnnnnataaagaatcaaattagtattttttttattttacaatttagcattaattcgtacgtccttccgttttgatctatacaaatacaaattgaaattcatattgaaagtataatatagaatataatgaattatgtaatgaatcaccataaaaggaaataattatgtaacgtgagcaatgctataaagaattcaacaaccttacgtctcgtacggaatggtttctctttttttttttttaaaaaaaataatttaagaatcaaaattaattttaattttgagtttcaatttattctttgtttttatttttttttaaaatgttacaaattgaagataaataaaatgagtcaaccattttatcttatatcgttctattatgaaataatgatggtgacgagataactggatgagaatggtgatgataacactggtggtttaggtggtggggtggaataatggaggcaacggtggtggtgaaatggtgatgatcatgatagtagtaatgaaatggtgatgatcgagttttaaaatccagatagacccaactagtcgaactggtttgactgcgatcgaaggtctagtcgagtcgagttgcatatcggatcgatcatgcattgatgaacatggtgcaacttggaatgacccgaccaactttgtggttaaatcgatgacccacttactagatcgggtctcccccaagggaggaaacatgctcgatcatccgggtcaattaagattgggtataaagttataacttttttttaataaagaacaggtcatgtaggtcagttagtgacctcataccttgactaagtcaattactggttcagattttaaaatttgggggggggggnnnnnnnnnnnnnnnnnnnnnnnnnnnnnnnnnnnnnnnnnnnnnnnnnnnnnnnnnnnnnnnnnnnnnnnnnnnnnnnnnnnnnnnnnnnnnnnnnnnnnnnnnnnnnnnnnnnnnnnnnnnnnnnnnnnnnnnnnnnnnnnnnnnnnnnnnnnnnnnnnnnnnnnnnnnnnnnnnnnnnnnnnnnnnnnnnnnnnnnnnnnnnnnnnnnnnnnnnnnnnnnnnnnnnnnnnnnnnnnnnnnnnnnnngaaatagtgtcaatggtgacaatagtagcgatggaatggtggcggcgacggcaacagtgtggtggtagtggcgatagtagtgctagaatggtggtggtggggtggaatagtggtagcggtggtgataacaacaatggaggtgacaaaacggtgccaacaacgacagcgatggaatgatgcgatggtggtggaggcaacaaaggcgaggtgcgatagcaattgttgtggaatggtggagacaatagtagtggtggtgacagcgatgtcgtggtgctaaaggcaacaacaacagggtgtggtagcaatggcgatgatcgtggtgaaatggtggtgatatagtgatggtggttagaatgtgtattttaaaactaaaaatcaaattcacaaaatcttttttttcttgattttgataatgaatatgaaactgttttgaaattgagttaaaaatcaattcaacctcctttttggcaaacatattttgttttgaaaatcgaaaatcagaaactcgcaaccacatcgaaagaggccttaaagaattaatttactccctctcattgcaaccaagagcccttgattaagggtggctttctttgtttaatttttttaaaaataattttaaaataatcactttaataataaacagaaaggatttgtttcttaaaataagaaaaaaatcattttttaaagtaattttttttttttagataaacacactaaaaaattgtttattttgttaaattacacacttatttcaccaaataaatttaaataaactaaccttaaaattccccaccataaaatgaattctttaacactatgttcctttttgcgcaccctttgcttgatcctcattactcaatctccttccttcgctaacaaatgctagaattcatggtcatcaatcataggctgcttggtaatggttctcacctaattggcaaaatttgcacgacgaaacaagggaatgaaaggccgctttgcgttgaatgctcttgaccctgcccacaatgatggctgatcctagagttctgcatgcaaaaaactttcttgaactttcagaggcggtcttgaagttggccttaaagaagggaatataaaggcagaagtttcttaagggatattggtgaagacaaaataagttccagccattgcagaatgtgcaaactctgactatgaatatgtggttatggcgtttaggagtgttctgagtgagttgatatacgaccctctaactgctatctttgctaacaatgatgccaaacatgctgctcatggacctgaatactgtgagacagccttgactgttgtacatattgttaaccctgcaatttctattcttaaccactaaatatcgttgcttagctttattgcattcctagccataaatcaacttgctatttaaggcaatttacttatgggtcaacttgcaacgtaaatgcatccatatttgcaattgcaggttcgaccaaagtgtagggatttctatttgttttagcttctcaccaagggagagtaattaataaaatcggatataagttttctgctatttgtttttggggtgttgactatcatctattattgtctatatatgacattatgtttattgagataggttttgtcttcgttttctttttttggaatccccaattttatgtggctaatatatacaaatgaatgaaataaaaacgattaagtgaatgaacgaaataagaatatgataaggtcccatagaaggggataaaaagggaaatatctcaggaaggttttagaaggaatgagtcacgtgtttcgttcacattagttattttttaaaggccccattagtaacctccatatccagcaccgtctcactacttctatgctcaaccaaagaaccccacaccaaccactgctccttgctcactgagacgcaccatggctcagactccaaagctaaaaacataaaccaagcaccaaaggtccatcctgtggctgtgttcttgttcttttgacactcagtgctttatcatttgtctgtccatctatcattttgccattgcattgtttggtgttatgagttttgtttctcagttagaggcttagaggatcgtctcttttcactatgttttgtaactaactaatcttttatctttaatgtttggttctggccctgccatcttcgtttattttcatgattgatggaagtttgaatatccgcgttcgttaacctagccctagtagccttagggtgcatttaaaaggatagatttaagtgtctaccttttctttttatgaaaaaaaaaaaaaaatcaacattgatcaagtagtaaataatctccgaaaggaccgaaaccagtccacacatttattttattcatccatatagttcagttcccccttctagcaaaagacttgaaagccacctagttgagcaagatacaaaataatagaaagggcgtaatatagtaataatcatcaagctgcatctcctccctcgtggaggagcatctgatcaaagtgccaaacacctgaaagtccatcaaggaaaacacgtaacatgaataccttcctttgatcaaagcaaaaacctcaggaaaaaatagaaggacacgtaacagaattagaaattcttaccatgtcctttgccaactcttctgagctgagcaacatactccgatattcttttgatagcttccacctaagaaagaaaccattcaacaatagtgttattgaacttcttagcagtcttttgccaaatgcaatgcatagcacacaatatgtacaatctctcacacatgaaaattgatagttgcgtcaagaaatttatattatacctgttcacccagatactcagtttccacaaagtcagccaactgcacgtcacctttctttgtggcaacctgtcaaacaacatacatcaagtttaaagcaaggaacttccatttttaacaatatcaatgtcaagacgattgataccaatgaaacaaagaacatgcagcaaaaccaaaactaagatcctacaaaggtggcttacactgtgcaagttaaggagcttttcgttcgttagcttctctaatgacagagcgagttccattgctgaaagagagggaaaaataattaactctgacatatagagaatccagttgagaatttcaacaggtaaagcctaaagaagcgatttttttttttcttgcactagttgacttctttatttgtattttaccattttggtaatataaagttatatatcagtactatataaatgtaacattcagtcaggatttgatttattttacataaacattatacgtaatgttaaactaggaattgaaaaaagaacttgaccgtaagtcccacaaaacaaaaatcacagctaagtatgttgagcttctatttcagaagaataagaggcgagcaataatatgagtgattgagtgagactgcataaaatccttgtttcatatgaatgaaaacagagtagtttgcttttctcagtgctccttcaattcatttccatttaataagtcactactcatttaacttttcaattcctatgatgataatttattccaaatcatttgtgattcatcacaagatactaagaatagtatcaaatcatgtcatcattcaaagattctaaaaactaggaattccaattctagaaacgatgtcaaaactgtaagatttcaaagctcgatcaagtatcttcaataatcaaaaccacaaagcactacgatgcggaaaaaaaaggttcgatccagaaaccaaatcacacagataacacacttcagatttagataacagaaaatgaaatcaaacctatttccaattaacacacgaactaaactgaaaacactaaaaagggaaattacaaggccagaaatactaaccgtgcagcgcatctcccttatctgcatgatcaaaatcagaaagcggcatcacaattgactgcaacttcacttttccaccacgtttgttctgaaaacaaataaacaaacaaataatcagaattcaacgtcaacatccctcgattccttatacgaaaaaataagtctaagtcaaacacctgatactccatcaatttctcagcatgctctctttcttcttcactcgattccttaaaaaaccttcatcaaccacacataagcattattaataactaataatgactcctaactagtataaaataaaacgatagattctaaaaataacgaaacggttacttacttggcaagtcctctcagcgcaacgttgtccctatcgaagtacgcaaacatggcatggtaaacgtacgaaacgttatactccacactgcataaaaaaataataataatcagaaggtgaaaaaagaaaatgaaataaaaccgatgagagagagagaaataggagcaacttgatttgttcgttaacggcggactcggattcgtcaacatatttttggcgagcgagagaagcttgtggaacagtgggaacgagatcgagctccttcttcacctcttcgaacggttcaaaaatcactccggttagggcgcggtggttcgtggatcctttcgccgcgcgaaccaccaatccacgagcggaaaccgaacggggaggttcggcgttcgggctgaagagggagagggacgaagcagaagcagcagcagcggttcggagaagcatggtttctggttcgggatttccacgaagcggtagatttgaaaggaaaagaaaacagaggaaaacggaacggaacggtgacagtgtgttattgtgagcgtgtggatagagatgggtctgtggctgtgtgggactaaaaggaggggttggtgatgtgggagccgttggatggggtgaaacgtggagggttgagatgtaaaggtggggctgggcgcgtggcgtgctcgtggtctagctgggtatcattgatgtgttgtccttgtcccttcaaatatctagaatcctttatctttaaaattattcttttctgggtccaattacactattttaagtggaaccttttgttaggttgccttttttccagttgtattttcccattaggggacgaaaagagcatgtacataaaaaataatgactcatgtgcgaattaatataaaagagatttgttaattataatttgtcaaatgctcaatatattgattaagaaagtaaaagataatttttttatttttttaattctttaatcaatatccaagtaagactcttatagtttaaaaatagaaatttgttaattgctatgttaataaattataattttaaatttactgaaaattttgaacatgtaatttattagcttaaattaatttctccgtgttttaatctaggtcacttcagagttaggagatctaagttagaagcactcaagtgtgtatatgtaatatgtccaatcctaggtcaaatgttgggttatattcatctttgatgtgtacaaattgagtcttgatattcttgggatcgccctttggatcgcaatttggtcattatctgagatatttgaccatgcatccagagtagatacagtgtatccaagattcgtggtcctgcaatggggccatgaagtaagaggaagtggttggctcatccatggtcggtcgacaactgagtcagtagacttggtcgatagacaaccaatagatacataactccttaatctcaagtgcgttagcatgaaaaaacgtaaaggaaaatcatgaattgattgacaattgattggtaggtacaacaagtaccaattttcttgacaattttaattaagtttatgaattattttactattaagtctttggacttgtatttatctaggtccttatttttttaaaaaaaattatgtaaattgtatttatttttaaattaaatttcaatatgaatctaattaaaaagggtaaatagttatttttatctctgaatgtgtagagcgctgaccaattcgtctcgctagttagaaattcaaatttttgtctccgaaagtgaaaaaagtgtgataaattaatccattcgttaactttcgtctgttatcgttaatgaaatagcctacgtggcacaaagagataaaaaatgttacaaaaatgattgccaacatggctgctaaatagattgaactaaaatgtcaataagtttccattgaacaaaaatgtcataagtttccattgaacaaaaatgtcataagtttccattggactaatttgtcaaatctcaaatttcgtttcatttaaggggaaaatataatttaatcttcatctccaccattttttatagttgcaaacataacattataataaatacttaagaaaatagggaaacaaacataatagtgaacataatattgattaataagcataacttgtcaattgctctgaaatttctaatgtggtagtaccttacccaaaatatgagactcaaacaaaaatgcacaatcattaagttaatccttacaaaaaatgagactaaacttgattttgtcactacctaatactgtcacaatagaaattttagagcaacagacaaattatgttcattaatcaattgtgtttgttattatgtttgttctaacttatgtgtgtttccctatttttttaagtttttattgtaatgttatgcttggaacgataaaaaaaagagaaagatgaatattacattatattttatccttaaatgaaacaaaatttaggatctgacaaactagtccaatggaaatttactgacattttggaccaatctatttagtaatcatgttggcaatcatttttgtaacattttcgtccatctatgtcacgtaggctctttaattaacgataaagaatgaaagttaacgaatgaatttgtcacattttttttactttcggagattaaaatttaaattttcatctttcatagataaatttatgaacgctttatatattcaaaaacgatattaaattaaacacaattcgaaaggtcgagatcacatcaaatttttagtagtggccaacttttcatattttctttaactttttcctaatgtctatnnnnnnnnnntataaatggattaaaaataacttctctcgtattcttattgggatacaaattttcatccctatgacgaaaataaaaataaagtaaataatattgtaattacttttatcaagagtgaacaatacaaaattatacttttaaaattttaaacaaacataaaaagactgtattctctaagttattaacttataattctaggaatgagtttttaatatcttaaataagcacagtccaaaagagtaatttggtctattttctcttatacatttgatctgactaatcctaactatgtctcctactactacgaataccttgcagtgttttctcttttcttcctttggaatgcgataaagtagctttaggaaggaaagcaagaaacatagatagataaatgtgaaataattgattaggaacgatgcttatccggatcagtgtcacgataagagctaaaaccagaaaagatcagaaagcaatcaatttcatcacattattaaattactaatgctagcgctgtcaatgagatgtgtgagataagggagaagatattcttcacttcttttttatttttatttcttttattattatttttgggaaaataaacaatattcttcgttattgtctcctttcatatcattcacttcttaaaaaatgagaagaaaagatgtcaaatcgtgagataaggttgctattcgcttatgcgatgattaaagtcactaaaactatcattttgagacctgctataatagtttttgaaattaaaaaaaatataaataaattcttaaaattaaaaacgattgttatcttaatcctttaaatttgttcttacgtaactaattagagtttaatgcttatatcattcaatcacactgcttgaaatactttaaaaaaattatttcaaaagtcaataaatttattgtatataataaattatgattaaataattatataaaactttttatattatcatacatatttttaaatttgataacttataatcattttagtctctaacgaaactagtgacaaagactgatatggttaacgaatttcgtttcaaaaacttaacttttttttgtttaatttcagaaactggtataacaacattttacaatttcaggaactgaaaacagtaatttattccatataaaaccgatacagaaaatgatgatcatgtatttttctttcttcattggtaacatatgatgatgtgtttttactttttacttcaagttttcagtaaggattgtcgataaggatctgttgggcaatgggcattacatggatgcgattgcgatctcatatattgtttagacaaactttttcaataggatggaccagacgaacccaagaaatgagatgtttggttgggcaattacttatatcactctacttttgcttttgcttggtgcaccccaaaatttataaagtcttcattttatccttttcatctcacttaatctcttttcctctccattttcctatttgacataaacggcccttatgtggatggtggcaactctgatcaagtcatcgcgccaaacattttgtccttgacatagaactcaacttgcaatgccaagtgcacgaagggatcttgaattggtgtctattatggataaattgataatatattagaataatgaattgctcaatctataatatatttttttattacagattattcaatccgtaataaaaaaatacattacagattgaacaatccgtaatatatcggaaaggtgcttgtggtgaagtcggacaaagtttaaggttgtagtgcgattttgggtttgtgtggttgtggtggtcgtaaaagggttctcgactacgtggcagtcatggatggcagcaccacagtcacacacaatgcaaatggcatagatttggggtggagtggttgcgaaagggtcgcgcacgtggcggagggcatggttctcaagcggagtggtcatcgaaggtttcgaggtgagatgcgttagtgtatatctaaggcagaggttgtgaggtgaaatgtgtttgtgtgcgccgaactagggcaaaggaggtggcgacgtgacaaaggaggaaagagatggtgagtggtggtgggcgatgtgactgatggaggtggtgggagagaggaagaagaacagaagaagggtaaatccaaaatattagaaaattatgagatgataataaataaaaagggaataattatttggttagaaattaattttaacactaattttacctagaaaaatagtaatgaccatgttgatttaatttgattttgttatgtatttaaatatatattaattatgcaaaaagaaattttaattttgattggaaaaaaaaaatctttagaggaaaagtttattcctataaatttagtgtaatatttcctatttgtttttatatatttgaattgaaatataataataaaaactataatttcaccacttttaactttcaaattaaattattgttttcatattttttaaattaaattaaatttgtataccaattaacttagacatgtctattgaaaagaaaaaaaaaacttaaggatgatgttattaaatgttgtatgattatttaatttactatttgattttataaaaccaatttcttaaaaaaaattaatcgaatttcaggaattaaagttaatgtaaattaatatattagtagataaatatatatttaatttattgaattacttaatctataattattataatgaaaattattacatttgatgtatatatttactattttcaatttactttcaactagttttctcattactatcaatctggaaaaaaagaaaaaaaattaatgactctcaaaatgtgaacaacatactcaacaaatataatgcatatatatttaatttattcaattacttaatctataatcgttataatgaaaattattccatatttatatatttattattttcaatctaccttcaactattttttttttcattactacctatctggaaaaaaagcaaaaaaaataatgactctcaagatgtgaacaacatactcaactgtctactacacgaaccacaattgttttgtaaacaatgcgatacgaatgcttcatttgtccctagttttaataaaataaataaatgacgtgatttatttcattaatatgaattgaggagctaaaaccccattgttgggagtacaccaattcaacgctttgatgtaaagtttttaactatctatttaatgttatttgcacattattgttgtttttctgagctttattcttgctagtggtctgatcatccatttgtatgctttgttttaggttttaatgcatggaaaatggttattatcttaagaactaaaaaatgtttctaaacaatatcatgtctagggataaagtgattgagtttagtctaggttatcgtctctaatcgtaacgcaaatcgtttaatgtaactcttgagggattaagggtgaacttaagtgatttaggtctagcacttggggaatcaaggttagattatattagtagatgaaggtgatcatatttaatgttgaatggagaaaaaccttttatatcgcatcaaagttagttccggttaacgaacttccaatacctttcatatcgtattccaaccatccgcatcattccgagtgtttgtgtctcttttcttgtagttatgacgccttttaatttacattaagtataatttaatcttatgccaatcattttaccaattaaattcattcattaattaattaacaacgaacgtacattagtcttaagtacaagcaaagtctatgtagaaatcgacattttgtcttaccagatctttattacttgaacaattcgatgcagttgtcgaaccgttatcaatacgtgtgtaggtatttataatacaactgatggttgtcttgaaaaaaaaaacttataggcaaagactaattataattaatgtcttaagtatattgattaaaaaatttaaagtataaatatttttattgtgagatagaaattgtattgtttatgatttttttacacttttatatgatttacataatattttttttcgttttagaatatatgatgttttagagaagaaattgtgtttcaaaatatatgtcattttttaaaatcaatatgatattaagtactttttttaagaatatctttaataaatacttagtggagtagtgcataaaaaattattaattaaagagataaagaatatattagaaaattatctaatgttttttttcaaattcaacaaattaatttcatttcttaatatttaggtaaaaacctcaaacatagtatattttggaatggagagaaggtatatatatatttcttttattttcttaatcaattctctaagaacattgattaataagacttaaatttgtatataattgatagtttaacttataaccaaagacactccctttatgtgttaattaatattctcctttagaattattcttgaaaattaaaaaaacatgcatctcgaaaatgaatcttcatggaaacgatgctcatttaatgttgcgttgaaggtctcatgtttttccttctaacgtggtgagatgtctgtttcttcagccatattttattgtcttcaaaatttgtgatttcagagaaaccaaacgacaggtttctcagcttcagcttccatggtctcaccttccgaggggttgaagttctaaatttagaccctatctgttactagttctaaattattaactactcgatatgctttgaatggaggcgttgatcaaaatgagtcccgtcaaattgaatcttatttcaataagttttttttttaataaaaaaatgtttttttacaaagattatttctatttttatatgactttaataatttttttcatttataataaagtgtataaaatatttaggaataaaataaagataaggacataattgtaaagatagtaattaatattaacttgaatttctaagtgaacaaataaatataaatgggtttttgctaggtgccaacttacgatactaattaaaaaatcaataatagattttttttaattaaaaatcacattcagatatattaaagatctaaatctattaaaaaatagttttattaacaattcatccatcagtttgatccgtaggcaagtaaatccagacgctcattaccttattaggacgttttgattttatgttattccaaaggtttgttgatactcctctattaattatttgtttataaatgatatggacttttgcagtaaaaaaaatagatttgtttctttacgttagagaaaaacacaaattannnnnnnnnnnnnnnnnnnnnnnnnnnnnnnnnnnnnnnnnnnnnnnnnnnnnnnnnnnnnnnnnnnnnnnnnnnnnnnnnnnnnnnnnnnnnnnnnnnnnnnnnnnnnnnnnnnnnnnnnnnnnnnnnnnnnnnnnnnnnnnnnnnnnnnnnnnnnnnnnnnnnnnnnnnnnnnnnnnnnnnnnnnnnnnnnnnnnnnnnnnnnnnnnnnnnnnnnnnnnnnnnnnnnnnnnnnnnnnnnnnnnnnnnnnnnnnnnnnnnnnnnnnnnnnnnnnnnnnnnnnnnnnnnnnnnnnnnnnnnnnnnnnnnnnnnnnnnnnnnnnnnnnnnnnnnnnnnnnnnnnnnnnnnnnnnnnnnnnnnnnnnnnnnnnnnnnnnnnnnnnnnnnnnnnnnnnnnnnnnnnnnnnnnnnnnnnnnnnnnnnnnnnnnnnnnnnnnnnnnnnnnnnnnnnnnnnnnnnnnnnnnnnnnnnnnnnnnnnnnnnnnnnnnnnnnnnnnnnnnnnnnnnnnnnnnnnnnnnnnnnnnnnnnnnnnnnnnnnnnnnnnnnnnnnnnnnnnnnnnnnnnnnnnnnnnnnnnnnnnnnnnnnnnnnnnnnnnnnnnnnnnnnnnnnnnnnnnnnnnnnnnnnnnnnnnnnnnnnnnnnnnnnnnnnnnnnnnnnnnnnnnnnnnnnnnnnnnnnnnnnnnnnnnnnnnnnnnnnnnnnnnnnnnnnnnnnnnnnnnnnnnnnnnnnnnnnnnnnnnnnnnnnnnnnnnnnnnnnnnnnnnnnnnnnnnnnnnnnnnnnnnnnnnnnnnnnnnnnnnnnnnnnnnnnnnnnnnnnnnnnnnnnnnnnnnnnnnnnnnnnnnnnnnnnnnnnnnnnnnnnnnnnnnnnnnnnnnnnnnnnnnnnnnnnnnnnnnnnnnnnnnnnnnnnnnnnnnnnnnnnnnnnnnnnnnnnnnnnnnnnnnnnnnnnnnnnnnnnnnnnnnnnnnnnnnnnnnnnnnnnnnnnnnnnnnnnnnnnnntttcatatttttttgattataaatatgctacttgggttgtattaatttgtctttgttaaggctttcactcaaagcaattgaatgaaataacaaagatgaatgaatatataactcaagtaatttagaaagtatcaattttctataatattaactaattctgtatccacttacgaaacaaatttagaatatatgttgaaaaaaacaattatactagtaattttatttttgctgatagtaattaagtgttaattaattaatattcgatcgtgatgattttttaattatttttttggtaaatagtagtacatcctaacattagtactttaatcagcatgtaaaatttaatatcatttcattcacttgttccaatcaattcaaaggtagtgttacacatttattttgaaaacaaagccttgcacattttgaaaacaaagacgtataggagaccgacatgccatgaaagaagagctgttttatatgaaaaggaagctttgaatcatgtgaggcaattaatgccaggaaagcttagggtttctaccacactagccacaactcgtacgagtttcaatagtaatctccatcgaaatgagcttcatttataataatccctacaacttaattgaatgtcaggaatctcattaatagcttggtggtgggttttgtgttttctttgcttttcaacaaacattattactatactatatgccatggcattcacatttctgccatttgagttaggtcataaagtattaatcatgtttggtttcttagaatttattaatattcaaacaaactgacctatagttatataatacaatatgtcacagatacacagcaagcaatgagctgggcaggtatcttcgtgatgaaattacatgtattattagtatataccaatctgtctatcttatgactcttgtagaaaagatatttaactaaagtaaatactagtactaaataaattcaatagcaaccatgagcaagagttattcaccgattgatacacataaaaatagctaggaaggttatatgatcgagaacgaaattgtatgtatgatgcttaagtaaagaataaaataatgaaaatggctacagtttgcattctatcatttgcaaaggagaaaaaaaaaatctctttttgggatgaaaaaaatatgccatgcatgtcatcagtggttcaaaaaaatagaggattatgatgaagcttaccatgagaccgcagatactgcttagctagcttctccattcaatggagattaattaactatatccgcgcgacacatcaatttgtgaccgatagatatttaatttctaatagtattagtttgtaacgataacggctcacgagacgaatctcttccattcagcatgtgatcaggaaaaaatctgttatatcatatggttgttgatatatcttcctttgtttgagttttcttgatacggaggatctaatatcagcttattcaaagttgcccatttgaccagagaagatgaggaaacgttctattcattgatcggcctaaacatatatatatcttcactatattgtaagaaacaaccatacgatgatggtgaaatgcatcaatggaaaacaaaatcaacaccatacgatgatatatgcctttatatagtagatatatacatgcatgtacactagttttgaggaaagaaacaacctttattttttaaaaaaagatattagaaaaaaaatctaaatctaaccaaataaaaacattgtcttttagttcaagaagagccagctctcgttaatttagtacaagaagttttacactattcacccataagaaagtataagtagaatacgactttaacataattattataaaaattaataaaattatcctacacaatcatttataatttaacaatagtataatatttttacagatttttcactaagcatatatgtatatgtgcagtatagataaataattggttttgataagatttgggtgtgaaatttataaagtcaaccctctatataaatcggtcaccttaatttactctccatatatactcgtgtctacctcttctatgtaacttaaataaagatgtacatttctttataaccaaaagatgatatgctaatcagctagctgatcatgagctaatacaatgaattcagtcaaactataatcttaggagagattgatatataaggaaatgttgatcagtatgagacggtttttctgtcaaattttattttacaattttttaaatactatttattttaaaaaaagatattgatcagtgttgctatttgtgcatttggtgtcctgccagggaattgataacgtacgtttgtgcattcacgtgaatgcttttttatatgtcattgtgatagtcatagtcatagagtctaacaaatattcatgtgttgaagcttcacatatcttagtaatgcccgggtacttgcaacaggtcctgtgctcttgactcagcagaactaaacaaggtacgtcacacccttattcaaatacgtgggagctatattgccaacttggctgtcacaatccacaacttttatttggcagtttctcagtcataattgttgttgttatttcctctatcacccttcgaacccaaatcagcttaccatatagtgacaattctcaagtcacttgctctctcagctatggcctatataataacaatatggagacttgaacctattagaccccgccaatttcagcaataagtcaatacgtgatacagcttttctaccgtgaagcagaaaattttcttaatttgactctcaatgaagcaaaacagaagcataaaagtttgtgtaataatttcctgatttattttatcatgaatatattattttctttatagtgccaatagttatttattacttactaaatatatagttttctattgtgcctctctatttaaatagaatatttttgtattggcgtgtgctttgttgcgttttgttttacatgattatatttttgctgaagtataaaatgtttaaaacatttacttttatcagcctatggaacctttacgctcactagtccgaatttcaagtgactgatatggatccaccaagttacaatgaaccacaaggcctagagatcctaattcctagacagagctaagaccagggtgatggtattatatgccaaagtaattttttattttaatttcaactctagacgtgacaattaaataaagcaatgcatacaaaaaaaagaggaagaaaaagagatataaataacttaatctcttaatttatctataaattaataaatattttaatagttgaatgtaattgttactttagggtccttttatttgcagagaaaagagaaagaaaaaacagttaaataaacattaaaatgtaaaataatgtataattcacgtatttacactccactttaatttaaaaattttaactcaatttattttttattactttaatttaaaatttttaactatttatttttattccatttggttctattctatggaagggacccttaatgacaatactgtagcgtaattagttagcaggcggctaatctcagcggctgtattccattataaatacatcaaatctttcaatcttggtcttattatgtgcaactctttgatttgtgttctattaacttcctctgttttatgcttactccttttctccttttagtcccaaacacaaccgtttttcttttttcagttttcctttgtttccaaaaaagaaaaaaaatgggtggaaattccccttgtgcctcatgcaaattgctgagacgccggtgcacaaaagactgcaccttcgctccttattttccttctgatgacccccagaagtttgccatagttcacaaggtttttggtgctagcaatgttagcaaaatgttgcaggtactttttccttactgtttctatttgccttcttttgatgataataaaaaaaaaaaaaatacccttttgtggttagttagttatttgatcaatttcagaagcaaagaaattaggaggtgggagattcaggtaagtctttcagatagtgtttgttaatgagcctgttttaagaacttttagaaaaaaaaatttcacattagctaaaattagcttatgctgttatagacaagttaaaaataattttttagaaaaactacaccagagaaattctacaaattagattatgtataagcttcttagggcctttgttcttttggagttgtaagtagtgtttatttttagtggatcgggggctctaaatggttgtttcttatgcaatgattcattcaggaacttccagttcaccagagagcagatgcagtgagtagtttagtgtatgaggcaaatgcaagagtgagggatcctgtgtatggttgtgttggagccatatcctacttgcaaaatcaagtttctgagctccaaatgcagcttgcagttgctcaagcagagatactctgcatccagatggaacatgagccagtgatgccagcctcacaaattgatctagaccacaagtcttactttctccaaaatgacctctctcagtttcttgcttttgactcttctagcaatgtaatgcagcaattttgcccatgacatggtttcttgaatgaaaattgctcacatgctttgggtttggtctattcattattttgtcttttctcaatctctgtgagacattttatatcatacatctataaactttttctatctaggattctaggtagtgaggagatagggaagggatttctaaggttgaccctagcacttgattaagtaaaacacttaattaaggtacttgatgttaatgcagccggtgaggacaaatatttatggtcgtaactaatgtttatacaataatatttaaattttacaatttacaagaaaatatcaataataattgattatgtattatatgaggaagattagtgaagacatgatccagaactatttaataatttcttagtgtggacaagtttagtaatggttttagaaagtgacaaacattctcataactatataaaaaggctatctcaccatcaggaaagaaaatttacatgtctaatgaacatcaaaacattttgtttttctcaactaaaactgttctcgtttctttagctagaattttttatgttgtcatgacaattaagttagaactttaaaccttatataagttattcaaacatataagctagatattttgtccaatatttgaatcatagtattcaaacccacacctaattgagttgtgtatcaattgattaatgggagtgtccttcacaattcttaaacacaattttaacatctcannnnnnnnnnattattataaaaaataaaaataaaaaatggatcaataagtaacggattgtaattcatctttttgtgcttaaatattgaacggaaacacgtggatattactagcttccttaaagtaaaatgttagttgaggtacttttgattttaaataacaaagtgcctagctgatgtcattcgggcacttatcaattaagtttttttttataaggatgttagatgacatccgttaacatgaaagaaactaagtgcatctttggaatgacatcatgtgatcatgtttaacacgataattacttaaaattcatttaaatgacatagaagctaaaataaaatgcatctaaaatatgtgaatatgtgagacgtgacatcaaagcaaacaagtcataaattaattgatgatttacaaatttaggaattattttgacatttttttaacttcatggatcaatttgatcgattattagaatttgtaagattaaattgattgataatttatttttttaacgattaatctgtcattttgttaattaatttcataaaccttaattgataatttcaaaagagtaaattagttattcactcatgaattgctacttctttttctctctttaataattttattttatttttctctcaagatataacattccctaatatattaactaaaaactcgttataaattacgtgtataaagatgcgaacggcatgaatagagaaaatgtacgacatacaatgcctttacattgttaattagaagttagatatcatttagctctcacctttctcttaactttgccgtaccatttaggtaaacttgtgaccacaatgaacaccagaaatcacagggacagtggaagctgacgcgaactttgtattccaaaagagaggaaaagagaaaatcgaactacccctaaacgtctaaattaaccattacttgattaaaaagcgcatgcttggttcaatgattgagctagtgattaaaacaaatgataacacgtttttaaacaccactagttttaaattaaatctgttggttttggacccttaagcatcttaatgaagattcaattatttgtgatgtatgagaaacaaactcatgcatgcatggatgaaagagcttagtttccacactaaaaagttaatttatttttaaaaaaaattatacttttatttagttatttgttttaaaaatatatatttagaataatttttaattaattaacaatataaaaaatttacacttacagtgtataatttttttattaaaaaattacatgaagcctcacattggaatgagagaaattgcaactgtcgttcttgtttctttgaattttaaaatgaaaattttattattcatggaattagatggacaaaattgtagggagttaaaagatgctgaattatatttgacagcagttgaatagaacaacatcattagtaatttagaatacagtaaatgacaaatattcgtcaatatgaaattctgcctctttgtggagacaaagaaagtgataatgggaaccacatttatattttgagggctcgaggacaatacttccaaaataagttttctttggaattcagatgccactaacccaccctccccagttcccttctctttgactttgttttttattctttcacttaggtcaaagtaagattttgtggcacttttcttcaacaccaaacaaattaacattatgctaaaaaaggctacactatattgaacttgaagctatccatatactccatatcaattttttttttgcgcgccgccataatgtatacaaacaaaaccgttttggtgcaaattcaaatgtttaaaattgtgcagcttggagcgttgaacctcatagttactagtattttctagtttttggaaaacaattgttaatttagttccctaattctagacgcgtggcatgttaggttacacagagttgaaagttgtaggataatagtgtttcgagtcttgatagcgcttggtatgccatgttatgttacacagttgaaaattgtaagataatagtgtttttgagtgttgctaacacgtgcttagttactgatgaatttttgtttaataacgtgcatgtaattgcctagtgttttataactaataaatgcacacactttcaatttaaatctacaataaataaagaaagacataaacaaagagataaatagataaacacttgtcttcacagtttcgttggacttgaatgatctaaagagacttacgtacgttgttatttgtatagaaattatgaacttggaaagcagcaaattatgcttagttttacttgctgcttaggaatcacatccaattcgaaatccaaatataaatataagataggtacttcataaatgacaatttatgatcctttatctccaattgataacgtggagactttgctaaattctgatttaatttgttccatcataaccgcagacctgtataatgaatttgagactagaagtgctagcaggaactttgagctcagaaacatagaaacagtttacatgtgctactccaagatactcctgcacaggttccaatgttgtgcttggattaccatgtgctagctatggtggtttctccacatacacattgcagtgtgaaaatgcaagattctgtccatttttcagtttccaagaaattttaacgctaaggatccttgaatcttgaggaccagatttcccattgatgcattcaccatcaactagcaacgaagtagaaactggaaaatctggcttatagttagaagtcttgacagtgatgtgaccaagaacagcaaaataatcagttgaggaacgcacagcatgatcaggaccaaatggtctggatttcatggaaggagcatttggcctatagcacaaagcatggattccagtgagaatgtaaccatttcaattgtaccttcatgtataacccatccaggggcatttcccttgtgctcacttgttaggactactttgctaaattcacttgacagatgatccattccatgggaagtgagtagtacaggcgttgttttgttgatggtagaagtgaactcaatgaagaattgctatcagatttcacctgcatttgtcacagacttcaggtgtcaaatagactaagaaaagtgggtactgatagaaatctcaaattgtatataatgattttggtgaactagtcagtatgtgcactataccattggttaaggaaagatacatatctcacttccgttccctcaaataagtatctagatttagctccctaggaagataagctatttttttagtaaatttttattttcactgctgtatcggcgctttctagtagtgtcaggttagatgagtctgatggccagagatgtaaaggcataaaatcattggtgcatttgcctttgcgagagttgggtcatgacaaagagtctctatgaccagaaggtctaaacttcaacctttgccattataatttctaataaaaatttggatttcaatgcaaagcaagtaagcttgtgcatttgcctagttcaagcccaaagggtcttacacgaagtggtgtgttgaggataagttattaggtaatcttggatcacatggtctccattaatttccctatgacatgttatcaagtgttattaatttttccttgtaaattgaaaaacttgaatacatgtcatataaaaattagttgggaccatgaacagtggtggtcctggaccactttataatttctcatgcttgaaatatacaagtaaattcatgtgcctttagctaacaatttaagattttgaaagagatgagcatgtaccctccctatcatgcttcaaacctgaggatagagatatgtacaatttttccagcaattttaatagaggtgatagctttaagaataaatgaagtgaataggcaacttggctaaaatgaactctccttgaaagattcttctcttttaagtaccctctccaagagatccttcgaatgtaaatttccccctccactatatgatgcttccttcaagctacattttataagcaagacaacatatacttgagaacttatctgaactagttctgaaatgtagtaatttaataccttgatttaaaatagaacagaaaagaaaggaggcatacaaaatcatggaagttgtaatactacaaaaactaaaagtacataataatatgagaagtgtttgcacactatcaggtcagccatcaaaccttataaataagttccagaagcacataatcttagcaatatgtgatacttaatcatatttccagtctcttggtaccaaaataggccctcaaaattcaatatggaaagaaggagcctataatctacactgaattttctgtggtgaatttttgtatcggagttaattttgccagctatacttcaaataatactatgaaagatgcaatatacacactctgttggaatttccagttaaagaaaattataaagcattggatgctttatcactttacaataagttgaatagaatttgcagtagaatcggcaaactgacggggtgcacgacgcggttgcctgaaaggtcctttgggagtgcgagacctcagatatcaacaagatcctccctgacaacgatgttttcttcaaaggaaagaggagaagattgaagaggaaaaggaagggggtggggagtgcaagaaattgcataggggttatcttggtcctttccttagtattttaaaatctaagtagtgggaataacaagaatgatagtgggaatagttgttcgcccatgttatggttttagtagtactgtaataatacttttaacttgttatgctttcagattggttattcttaaagccaatatttataatcattttataatgtaattctagattggtaatttcataacccaaaaaaaaaaaaggtgcgagaaacaccagcctgagagaaactatgaaagcgtcatcaatcaaatagtttgtcatctccactcaacacgacaactaattttgtgtatattttttaaaattttggtcaatgaacaaaattattttttatcaataagataataattttagagtttaaatatattttagtttctgttaatataacgattaattcctgtaagaaattttctctcttaaaaagagaaattattaaatagtcttgaacaaccttctatccatgatcataattaatttctatgtaatacgtattttaagctttttaatttgaaaaaaaaaaaacacttaaatacatgtatgtaaagattaataggaacaatataatagttcaaaattacttaataatttctccattaaaagtttccgacatttttaggatcacatcttttagtcactaccttatcctctttttgttatgtgctgatgaaaggccaagttaccgatgccacgtcaatcatgtgaggccacatgtacacaacttattgagtttcttcttcatatctgaaaacctttatccacctaataatctcttgaacgtgtttatataactagtgctcaatgattaaaaaaaaaattaaaattacttataagaagctgtatcagagacatacacagaactcaggtcacatgacttttactgttgctcttgccataaacttgataatttgattttgtagccttactaggatgtggtcaatcttataattcccattatgtggcatttaattaggcactatataatactaagtgttaaccttggttatgcaatatctcatattggattttctaattttcacgttctaaatagtttggctagtgtatactcaatatgttggggtcaattattggaatccataccatgttacaactacctaccttagaaaattacaagcattggttttatgtgtcagggaatgcagatacactcatatggcggtggaattggaaatgactcataattgatgcccatcatgccatattgttacaagtgggtagttaattacagagctaacacatatacttgatcaatgccnnnnnnnnnnnnnnnnnnnnnnnnnnnnnnnnnnnnnnnnnnnnnnnnnnnnnnnnnnnnnnnnnnnnnnnnnnnnnnnnnnnnnnnnnnnnnnnnnnnnnnnnnnnnnnnnnnnnnnnnnnnnnnnnnnnnnnnnnnnnnnnnnnnnnnnnnnnnnnnnnnnnnnnnnnnnnnnnnnnnnnnnnnnnnnnnnnnnnnnnnnnnnnnnnnnnnnnnnnnnnnnnnnnnnnnnnnnnnnnnnnnnnnnnnnnnnnnnnnnnnnnnnnnnnnnnnnnnnnnnnnnnnnnnnnnnnnnnnnnnnnnnnnnnnnnnnnnnnnnnnnnnnnnnnnnnnnnnnnnnnnnnnnnnnnnnnnnnnnnnnnnnnnnnnnnnnnnnnnnnnnnnnnnnnnnnnnnnnnnnnnnnnnnnnnnnnnnnnnnnnnnnnnnnnnnnnnnnnnnnnnnnnnnnnnnnnnnnnnnnnnnnnnnnnnnnnnnnnnnnnnnnnnnnnnnnnnnnnnnnnnnnnnnnnnnnnnnnnnnnnnnnnnnnnnnnnnnnnnnnnnnnnnnnnnnnnnnnnnnnnnnnnnnnnnnnnnnnnnnnnnnnnnnnnnnnnnnnnnnnnnnnnnnnnnnnnnnnnnnnnnnnnnnnnnnnnnnnnnnnnnnnnnnnnnnnnnnnnnnnnnnnnnnnnnnnnnnnnnnnnnnnnnnnnnnnnnnnnnnnnnnnnnnnnnnnnnnnnnnnnnnnnnnnnnnnnnnnnnnnnnnnnnnnnnnnnnnnnnnnnnnnnnnnnnnnnnaaaaaaaaaaaaaaaaaaattgtcctatccttcaagcagaaattctctttgtaggttttattgtctgcttatcatttgtggacttatccaaaaattagctagctgtcacttgctcatatgtattatgtggaggtgctttttaatggtgttaactaaacagttcctcatcttttacttattattgatgcactggacttgaaaatttgattgactcttatccggacgtagcttgcctataagtaaaaccagtgtggtctctcataaatcataatattactctcttatattatttacctgctaatgcatttattttgaaactagaataagtagttctaatgcctgtataggattaaacaagttatagatagttaaggatttcatgatgtgacaagaaataaagtgaaatttagcggggtgtttcaagtaatttttttttgaaaaggccaaaattttattaatgcatagaaattaattagaaacaaaacccatgtacaaggtattaatgcctaagttttggaacagagtaatattgatgccccttctccttgtcagcacattcttccttataaagaaagcaattattgtaacaaccagtagaagagttggggccgtagaagaagcaacaagaattttagctagactccagtgtcctaacatacactagcatattttaccagaagggtaatctttcaaagtattttatcttttcacaaaaatacatgcactagcattgatcaacaaaaatattttgtatgtttaggtgatccatcgttctaacccttttatattaatgtccaacaaattaacctacaactgcataatatatacctacaacgtctgaaatttctatgttttggtgagaatctaagtaacgacgcaagttagttccaaatggtagctaaatgtgacctaatatatacctaatcacactccacctaatgtccaaaacaaaattaattcttaaagataaaaaaggccatactggtacatcttttgtttatttgggtacaatcatttatatagaaaagggaagtcaagtgattatgattagcaatcttccatgcgtccttaactttgaagccaagcaatgtttataatctccaaacgtagtgttcctctcgtagtatcgcaccatatggatcccactcgacccaccatatctcttcatttcacccttctagctcgcggttgtaattacaacctctttttttttttttttttttttttcaagagtgatgttacatgcttgatctggttgaatatttaacatatatccaatttctcttacaactcactttcactttatttttcttcttatttttctctttatttctcatttcattttgtcacatctatcgtttccttttgtcatacaagccgaaattgggatacacgaataccattactctttaagatgtgtatcacctaatattgttgtaggaaatgtttcagaagaaattgggacaatccaaaaatagcaactcaaaggatatttacttgacataaaaaaatgacatattataagtaatatctaattatctttatttttatttatttcatctacatacatcacaaaatatactctaaaaaaagtaactttatttgtcccatcccatttaacattcaccaaacatttttctattaatggctagaaagaaaatgaacaagttgccgtaatcacacattatagtactgtcatgtggtgtggtatagctttcgcttctcattcactgatctttctttcttttttaataaaacattcaccggtctttctatacctactattgagagagtattaaactataatttattgtcttataatgatgataattatacaccttctatgtacatcttataggaagaaaaaagaaaaaagaaaaaaaattataactttcgatgatttttgtcataaaaatgtgtaacttaaaaaggtcaaatcctttctcctcaaaaaataaatgtcaaatccttttagtagtcattttcttttgacaattttattgtattgagttttattttttcagttaattatataggaacactatgacacaaaaataaaagtgtaatttttatatatttttaatttaaaaaattatcaactaattagaaatcatatataacttttaaagtaattaaacaaaagacaacaatcttaattttaagataatcttagatgacactaacaaatatttacattgtcaatgtattttgttaattaaatttcaaacgtgatactcatattagggttttttagttcatttttatttttttctctttcaattatttatactaatatgattcttttccctatcaannnnnnnnnnnnnnnnnnnnnnnnnnnnnnnnnnnnnnnnnnnnnnnnnnnnnnnnnnnnnnnnnnnnnnnnnnnnnnnnnnnnnnnnnnnnnnnnnnnnnnnnnnnnnnnnnnnnnnnnnnnnnnnnnnnnnnnnnnnnnnnnnnnnnnnnnnnnnnnnnnnnnnnnnnnnnnnnnnnnnnnnnnnnnnnnnnnnnnnnnnnnnnnnnnnnnnnnnnnnnnnnnnnnnnnnnnnnnnnnnnnnnnnnnnnnnnnnnnnnnnnnnnnnnnnnnnnnnnnnnnnnnnnnnnnnnnnnnnnnnnnnnnnnnnnnnnnnnnnnnnnnnnnnnnnnnnnnnnnnnnnnnnnnnnnnnnnnnnnnnnnnnnnnnnnnnnnnnnnnnnnnnnnnnnnnnnnnnnnnnnnnnnnnnnnnnnnnnnnnnnnnnnnnnnnnnnnnnnnnnnnnnnnnnnnnnnnnnnnnnnnnnnnnnnnnnnnnnnnnnnnnnnnnnnnnnnnnnnnnnnnnnnnnnnnnnnnnnnnnnnnnnnnnnnnnnnnnnnnnnnnnnnnnnnnnnnnnnnnnnnnnnnnnnnnnnnnnnnnnnnnnnnnnnnnnnnnnnnnnnnnnnnnnnnnnnnnnnnnnnnnnnnnnnnnnaatactttaataatccgttttggataaatccaactttaatcaaaaacaacactaaaagaatactttaagtgactttagtgttatcttttaattagaatttgagtttaattaatcttgatcattcatgcaagtatttatcacattacccaacttgtcatgcatatattctctctcatgagtaaaaattaatgtataaatattaatcatttttttgaaagggtacaaatacttggtgttcaattatgtggttatttctcttttctgcaaaaatgctgatatatatttattagtcattaatcatgattttccatccttgttaatttggtggttatctataagacagaaatggaccccttaatccgttttccttaactcgcacatttcctcctttttctcttatcttaacttttctgtttagctgttctttcagtcaaagaaaaaaattgttggctatattaattaaagaaaataaaacatacatgatagatatatagtggcaggggagaaataatagagaatcggtagttggttgggtttggtgaatggtttcatttcatgcaaatgaagccaccattctcaccctcttcttcccttctcagaggcaaagcacgcctctctccctacctctttacccttatagctttcattctctttgtcgctatcctctatggcgaggacttcatgtgcatctttggtcaacacttccaaaactactctaattaccctcacaaactctccaccaccaccggtgggttcatagttcactcacttttttaggctttcttgtggtaattctatctgacaaaaatatcagccacactcttatataataaatatcagttacaaaatagttaaagtacatatattgtttaactgagtaaattattatttaacaacaacaaaatatatgacttaaaacatttgatgaaacattaggaatgaaaatggccgaattacgttttctaattaaagcttctgtttaatttgtggtatcgtgtgatgtgacgtcttcttttgttgaattttggaacaacagagatggtgaagaggcagaagctgccgtttgcggtggggaaggcggaggaagggtgtgacgtgttcagcggaagctgggttcgggacgagttgactcggccgttgtacgaggaatcggagtgtccgtacattcaaccacaattgacttgtcaagaacatggacgacccgacaaggattaccagaattggaggtggcaaccacacggttgcgatcttcccaagtaagccatgtttggtttaaactttggtaaaattatttttgatagagtttatattatttgaaaacttgtaacagttttgtatgtatagtattattgtgagtccttaattcgtgtatgttttaattcacttgagcgatttgaaatttgaatgtagttttgtagttaattttgatagagtttatattatttgaaaacttgtaacagtttcgtatatatagtttagtattattctgtgttctgaattcgtgtatgctttactttacttcacttgagcgaattgaaagttgaaagtagttttgtagttaattttgatagagtttatattatttcaaaagttctctctttcctttatttaccttttatttacgccggggggaacgtattttagggtggtcgagcctcctactcatggaatacagatggtgttagaatcaatggtgatactgatggatcgggggctcgtgtcagaaagtttggaacaattaaatgaggcaaacttgaaaatatctgaaattttttgtaaccagatgtaataataaacattattaataagctttttcatttactcttttaaatattgattacaatttattaaaaattataaaattgtgtaagttttattttttatttaataaattttacttattgttttatagttttaataaatttttaagtaaaagtaaaaaacgtgtaaagatgagtttgttaaaaaaatgttttacaagacatctctctacatgaaatattcggtaacgctcatttaaataaggtaaagattaaaattatacctagttatttaaagaataattccaaaaattatcttgcaacacataatatcaattcaccatcatactttctttgtatggtaaatttgaatgtgttttatacttttaaaatattaaatgaatttattttttatttaatattttctttatagagtaatagaaaactttgtagagtcaatgttaaacaacatttttttttcacgacaaatataatggtttaattcaaactttattgtagattcaatgctagcttggtgcttgaaacacttcgtggaaaaaggatgatgtttgttggtgactctcttaaccgcggtcaatatgtctcttttgtgtgccttcttcataaactcattcctgaagatggcaaatcaatggaaacctttgattcactcacagtattcactataaaggtaaaataactttttggttgattcactttgtgatgtttctagttttagctttgtaatttagtctttttttcttctttctattgattttaatgtgttcaattaggaatacaatgccacaattgagttctactgggcaccttttcttcttgaatcaaattcagacaatgctgtcattcataggatatctgataggattgtcagaaaaggttcaatcaataagcatggcaggaattggaaaggtgttgacattttggtattcaacacttatctttggtggatgactggcttgaagatgaaaatcttgtatgttttctattgtattcaaaataacaattgcttagccatctttcatttctttttctaagtagtttgatataatatttgatttatttatttctcaaatctttagacttggatctttcgatgatgaagtaaaagagattgtcgagctctcaacagaggatgcttaccgcatggctatgaaaagtatgcttagatgggttaggttgaatatggatccaaaaaaaactagagtgtttttcacaagcatgtcaccttcacatggaaagtgagtatagctctctctctttcataaaaaaacatgcacacatatactgatatacacatcagtatcaccatcatatttttgtaagctaaaaattgtggtaatgtacactgtagttgtcatatttcaatgttctttaccaacatcctatgtgacaataacctaatgtttcttcataaatatgtgacaggagcatagattggggaggtgaaccaggagggaactgttacaatgagaccactctaattgatgatccaacatattggggttctgattgtaggaagagtataatggaagtaattggagaagtgtttagcaaatccaaagtgcccattacatttttgaacatcacacaactatccaattatcgtagagatgcacacacttcaatctacaagaagcaatggagtcgattgactccagagcaattagctaaccctgttagttatgctgattgtgtgcattggtgcttacctggccttcaagatacttggaatgagcttttgtatgccaagttattttatacgtgaaagttgaaactatttcaaatataatagatcttcgtgcgttctcatggatcattctacatttggcacttcaagttgtaaatgggaaagcatgacttgacaacttgtggcgattattctttatttgtttggaagtgatgtttggggatggtcacaagcaaaaatcaaacaaatgaaaatggatgtgtgcacaataatagttgccaatcaaaaaagagaagaaatatatgagaaaaattgaattgatttcttctctctttcctatggaagaaatgtaaaaaaaaaaatgttagtttatcaatccctaatatgtcatccatataagttttggtacattatgttgtttttagactcgcatgaatgaaaaacttacctaaaaaaaaataattagtttggttattttgagtttaaaattttggaggcatatatattttagtcatttagaggaaaaatatataattttcttaaataatgtgagattttatttttcttagctttagaaggtgatggcttcttccaattcccttataagatccaccattttcgtaannnnnnnnnnnnnnnnnnnnnnnnnnnnnnnnnnnnnnnnnnnnnnnnnnnnnnnnnnnnnnnnnnnnnnnnnnnnnnnnnnnnnnnnnnnnnnnnnnnnnnnnnnnnnnnnnnnnnnnnnnnnnnnnnnnnnnnnnnnnnnnnnnnnnnnnnnnnnnnnnnnnnnnnnnnnnnnnnnnnnnnnnnnnnnnnnnnnnnnnnnnnnnnnnnnnnnnnnnnnnnnnnnnnnnnnnnnnnnnnnnnnnnnnnnnnnnnnnnnnnnnnnnnnnnnnnnnnnnnnnnnnnnnnnnnnnnnnnnnnnnnnnnnnnnnnnnnnnnnnnnnnnnnnnnnnnnnnnnnnnnnnnnnnnnnnnnnnnnnnnnnnnnnnnnnnnnnnnnnnnnnnnnnnnnnnnnnnnnnnnnnnnnnnnnnnnnnnnnnnnnnnnnnnnnnnnnnnnnnnnnnnnnnnnnnnnnnnnnnnnnnnnnnnnnnnnnnnnnnnnnnnnnnnnnnnnnnnnnnnnnnnnnnnnnnnnnnnnnnnnnnnnnnnnnnnnnnnnnnnnnnnnnnnnnnnnnnnnnnnnnnnnnnnnnnnnnnnnnnnnnnnnnnnnnnnnnnnnnnnnnnnnnnnnnnnnnnnnnnnnnnnnnnnnnnnnnnnnnnnnnnnnnnnnnnnnnnnnnnnnnnnnnnnnnnnnnnnnnnnnnnnnnnnnnnnnnnnnnnnnnnnnnnnnnnnnnnnnnnnnnnnnnnnnnnnnnnnnnnnnnnnnnnnnnnnnnnnnnnnnnnnnnnnnnnnnnnnnnnnnnnnnnntaaaaaaaaaaaaaacataaatagtattagtgttttgtattttattttactttttatacttctgaaattaaaaaattaaaaagaaaaaattcaatgcaagagcaaaatatcttaaatttgcgaatatttttatgaaattatggtatactactagtttaaaaaatttcatgaatttctaattattctttgtccacaactttcgtgaacttcgtctttcatattgttgttgtgccaaagattgggcctgatattggctttcaaaatattcacttttaagtaggccggttttgttaggtgcacttttttatttttcttgcaatagagtattggttttattcaaacaagggatttattaaatacactatataaatttttaatacactatatgtaaatagtgtacgaaccggattgtccaatccgtaagtaatttttttttaagttaaaatatattttttcaaataatttaaaataatggcgcatgcaggtctcaaacctatgaccttcatgtttttaacgcgacgctccaaccaactgagctaataagtcaattatgttaaaaaataattaatgttgatacatataatactaaattttttaatgtatatttaatacacatatctaaatctttaattgtttagtttatataatttctttatcttttcttatttcagattcttactttattaattagagatattatgttcattttatcaattaggataattgttagttatgatcctatcaaataggattctcttttatttaaattttatcaattaatgagttatatataattaatttaatttaaattttattttgaatattgaattatttctcatcctattactttcataacaaatttttttaatgtatatttaatacacatataagtttagataataaattatgttaagaatattaaagtaatagcattagaaataattcaacaatcaaaattaaattaaaattaaattaattatatataactcattaattgataaaattaaaataaaagagaatcctatttgataggatcataactaacaataaccctaattgataaaatgaacataatatccctaattaataaaataagaatctgaaataagaaaagataaagaaattagataaactaaacaattaaagatttagatatgtgtattaaatatacattaaaaaatttagtattatatgtatcaacattaattattttttaacatagcgttaaaaacataaaggttacaggttcgagacctgcatgcgccattattttaaaattatttgaaaaaatatattttaacttaaaaaaaaacctacttacagattggacaatccgtattgcccatatggattggacaatccgtataacttaaaaaaaaaaacttacggattgccgaatccgtaagattcttatggattcgacaatccaaaatccgtatgaaggttacggaatccataactttcaaatcacggaaggcattttcgtccgtgcactgttcacatatagtgtattagaaatttatatagtgtatttagtaaatcccttcaaacaatactacgtggatttaagcacaataacttaagcctaaatttcagccttttcttcctgctgtcttgttcattgttattccctcgagttgaagaaaacccagtcacatgtgcacgtagtagtggagagattttgctattttgttttaggcccatgaaattcacactcctattttttatcttctcgcccctacattatttttgtgaaatttctattttgttgcgtattactgatatgatagaaactaatttctatttcttgaaatggtatcacccatggaggataaaagcaatcttgtaatgaaagcaaaaggaagaagaatcttggaaaataatgtttctgtttatttattaacttctggtatatcgctgaagctataaaagccagatatatatatacaacataaacagagttaaaataactaaccaactaactctcaattaactaactagagttccactactagttacagatataaagatcaaattaacaagctaagatcccccctaaagctcggaatgaatgttggacattcctagcttggaatataagaactgaaaagcagcaggcataagggctttggtgtatatatctgcaagctgattggcagaagatattggaagcaatttgacaagccctgtaaggatcttctctcggatgatatgacaatcaatttctatgtgcttagtcctttcatgaaacacaggatttgtagcaatgtgtaaagctgatttgttatcacagtacagaacagcatgttgatggaaagaaactttaaattcttctagcaaaaaggtgagccactgcacttcacaagtgacactagccaaagctctgtatttagcttctgatgaacttcttgaaacagtagcttgtttcttagatttccacgaaattaatgaagaaccaaggtaaacagcaaatcctgtaatagatcttctagtgttaatgcatccagcccaatctgaatcactgaatccttttagttggagatggctgtctgtgggaaagaaaatgcctgcacctggagaacctttaatatatcttaaaattcgagaagcagcttgttgatgagctgatgttggttgagctacaaattgacttaaattttgaacagcaaaagtagtatcaggccttgtattcgttaagtaaattaatcttcctatcaatcttctataaagaggaagcaaattcatctgatagaatagaaccagaattttgatgcaatctgacagtataatctgagggggtggatacaggtttagatcctagcatgccagcatcaacaagaatatctaatgcatactttctctggcaaagattaatcccagcagaggtacgagccacttcaaagcctagaaagaatcttaaatcacccaaatccttaattttaaaagcattatccaatagctgtgttatattctgaatctcagtcaggttatttccagacaagactatatcatccacataaaccaacaaagcagtgatagaattgtcataatgtttaagaaacaaagaataatcagaagtacattgtttgtatccatgagatattaaaaacaaagataacctggttgaccattgtctactggcctgtttcaaaccatataaggacttttgtagtttacacactaaacctggcttttctggtttcattccttgaggaatttccatgaaaatttcttcatttaaatctccatgtaagaaagcattatttatgtccagctgttttaggtgccatttgttaatagcagctagagctagtagcagcctgacagtagtcagtttagccactggagaaaaagtgtcaagatagtcctgaccctccacttgagtgtatcccttggcaactaatctagccttatacctttctatagaaccatctgatttatatttgattttatagacccacttacaacctatggcagatttgtggggaggaagattagtaacagtccaagtatgattatcttctaatgcttgaatctcagcattcatggcttgaatccaattaggatctttagatgcttcaatgtatgatttaggttcagtttgttgagtgacagctaaaatggtacaatggtaagatggagatagtctactataagaaagtacagaacttaaaggataacgacttcctgtagactgactggaaacagttgatggtaaatagctaacatggaaatctttatacttgcctggtctttgaatctgtctttctgatcttctaagagcctgtggtacttctatgggtgtagaaacagaattgtatggaacagatggtgatatggaagaagtagagacaagcaattcattgtcatcatcaaaataagaagtaggaacaggcaaagcagtaataagatcaagagattcctgagtaatgaaaggaaaacaatcttcataaaagataacattcctggatatactaatgacccttgttctgagatcaaaggtgacataaccctttgtgtgtgacttgaaacctaagaaaattgaagtagcagctctaggatcaagtttcttcctatttgcagatagtgtactaggaaaacaaagacgaccaaagactcttaaagtggtaatatcatagggatgtccatagagtttttcataaggggatttgttgtcaaggaagggtgtaggcatacaatttataagaatagcagaataaatgagggcataggaccagaaaataggaggcaacttagatttaaagatctagtgatattaagtaaatgttgatgttttcgttcaacaatcccattttgttgtggagtttctacacaagaagtttgatgtatgatactagattcatcatagaattgtttcatgatgaattctgaaccattgtcagaacgaatagctttcactttagtatcaaattgcctttcaacaaatgcaacaaatgattttaaatgagattgagtttctgctttagatttcataagaaatatccagacaaacctagagtgatcatccactattgtaaggaaatatttatgaccatttaaagaagtaacatggcatggaccccaaatatcaacatgtataacagaaaaaagggaaaaagaatgtgaattactgtcaggaaaaggaatttttctttgttttgcatgatggcaagtaggacatacaaattgtttattaattgaaagtaaaggatgtgattgctttaacaattgcaatttttcaaatgaagggtgtcctaatctaaaatgccaaaggtcaatgggtgttttattataagagaaagtgggattattagaaggaacagaggctataacagaagtaaaaccaggttccttcatgttgagcttatagaaagtgtccttttgctttcattacaagattgcttttatcctccatgggtgataccatttcaagatggtatcagagcttctttctttgaagaagctctgctgcgcaattaccttccctttcctttttactgtcatatcctccatctatacatcatgagtgcaatacaaccacagcaagatcaaactcttaatattcacagcccttattaccttcatccaggagaaaatccagcaatagctttggtttctcccgttcttgactcatccaattatacttcatggagttgttccatgcttactgcactaagcgcgaagaacaaatctgaatttgttgatggtactattcaaaaacccacgtcaggccatgcacttcatacagctctgataccatcttgaaatggtatcacccatggaggataaaaacaatcttgtaatgaaagcaaaaggaagaagaagaatcttggaaaataatgtttctgtttatttattaacttctggtatatcgctgaaactataaaagtcagatatatatatacaacataaacagagttaaaataactaaccaactaactctcaattaactaactagagttccactactagttacagatataaagatcaaattaacaagctaagactattatgtaatgatacacaacggagaccaatttttgttgagtatcataacaagattttattaagatagacaatagaaattatttttataaaaaagaaaagaaaagaaaagtggccgatgagaagataaaaaagcgaagtgtcaatatcacggacctttgtattacgcattacgtcattagacccaaaaagtaaaatatgcatgaacagaaacaatgctttgctaagaaaacgagaatcatgtgtatgatagatgaaatttcggtcgagatttaacaatatatacttttaatacattttaaattgaaaattttaaatttgaatttgaatgaattttttgaaagaaaaatattcttaaaaacgtatgtttcacgattattttctaaaatttaccaaatatacacttacattttattaatttgataaatagtccttccatcccaatgaaatcgaattacaaacacacttgtgaaaataaatttctccaaatcatcagctaaattcacttggaatgtgtttggatagagaattttaattgagaaaaataatttattggagaatttaaaattatttaatttaaaattcattatttaaatgtttttatatgaagaatttaaatttttagaattttaaataattaaaaatgtgaaaatttaattttcttataaaatatgagaaattgaaattttcttcttctataaaagcttttaccgcaccactttttaatctgtctccatcatcgacaaaatgttcaaaattttaaaataaagaaatttaatttttttatccaaatacaaaattttaaaaataaaaaaattttaatttctttattcaaatacaaaattttaaaaattaaaaaaatttaataaatatattttagtttttctaaattttaaacttcttaaaattttaaaatactttatccaaatacattatacttgaaagtgtcaattcgatgtaaagtaagagtcggagggaaacaaattccaacacaaagggggcaaggatgggcctgatcactcttcttggtacattagtgtttagggggaagaggcagatacaaacctaaacggggcaagaatgggccagttttttctttttcaatttgtttttttgaaaaattgtataatatattattttaattgttttatataataatatataattttatgattaataattaattaatcatataaaccaatatttatattaaatttaagttttgttcttaaaatttaatatattttttccttttaattattctcctcagaagtatcgcatgaattctttactattaagtttattttattttcttaaacactattattttaatgtagttgttaatataaaaaatccgacctctttatactttttataatagttagaaaaataaagagagaaaatcaagattaaatagaaaatgaaagtgtataattatattaaaattagactttatattagctagttggatggttttttatgtgcaatcgaaacataataataggagtttagtttatatattagttaagaggtaaaatagtccaaaatagtatggagattaaaagtgagtatgaccattgtaatagttaaaggtaatttatttgccaattttaaatgttttatctctctttaatttttcttatataataaaataaattattaattttaataatgagcatatatnnnnnnnnnnnnnnnnnnnnnnnnnnnnnnnnnnnnnnnnnnnnnnnnnnnnnnnnnnnnnnnnnnnnnnnnnnnnnnnnnnnnnnnnnnnnnnnnnnnnnnnnnnnnnnnnnnnnnnnnnnnnnnnnnnnnnnnnnnnnnnnnnnnnnnnnnnnnnnnnnnnnnnnnnnnnnnnnnnnnnnnnnnnnnnnnnnnnnnnnnnnnnnnnnnnnnnnnnnnnnnnnnnnnnnnnnnnnnnnnnnnnnnnnnnnnnnnnnnnnnnnnnnnnnnnnnnnnnnnnnnnnnnnnnnnnnnnnnnnnnnnnnnnnnnnnnnnnnnnnnnnnnnnnnnnnnnnnnnnnnnnnnnnnnnnnnnnnnnnnnnnnnnnnnnnnnnnnnnnnnnnnnnnnnnnnnnnnnnnnnnnnnnnnnnnnnnnnnnnnnnnnnnnnnnnnnnnnnnnnnnnnnnnnnnnnnnnnnnnnnnnnnnnnnnnnnnnnnnnnnnnnnnnnnnnnnnnnnnnnnnnnnnnnnnnnnnnnnnnnnnnnnnnnnnnnnnnnnnnnnnnnnnnnnnnnnnnnnnnnnnnnnnnnnnnnnnnnnnnnnnnnnnnnnnnnnnnnnnnnnnnnnnnnnnnnnnnnnnnnnnnnnnnnnnnnnnnnnnnnnnnnnnnnnnnnnnnnnnnnnnnnnnnnnnnnnnnnnnnnnnnnnnnnnnnnnnnnnnnnnnnnnnnnnnnnnnnnnnnnnnnnnnnnnnnnnnnnnnctcaagaatatgttattcaacacatgtcgattaaaaaaaatacatcatgtatgataaaatttataatatgataagaagagataattgaaatgtgtttgtatatggagtatttacaataaagaataatttgtatatcattactcataaaaaagtataaaagttctagagtaaaattaaagaattgtaaaaaaatatcaataataaaaatagttaattaattaggttataaacgagctaaataagctacacaacttttttttaagttctatttagttcgaaccaattgtcatgaacggtgacaatgaataaccatctatgctgggtccttgtaaaaagatatttttacgttgctggacatccttcttttacatgcagtctcagccaatcatactcttcataatattttgacgaaaaaaattcctactaaaaagcattttcctcttccttaacaaataacaagccaagttaaaactttgcattagactgatttaaataaacaagacaagggaaatctaaacttcaaataatccacttaactctactcgtttaatttacacccttactcactactattaagaacctatcattttttcttattttttttataggataaatggatagttaattaagaacttatccttaaaaaggtgcgtgattatggatgattcccttcctcctttaattttgttcggttggggaaattctgcttttcctgttgcccccactcaatgggagtgggagatagtttctgtcttgtatcaacctgatcatatatttacgcgcatatgaatcatttttaattcttaatttgtgcttgctgagagcatgcacctgcgcgaatatgcatgtggtaattgctaataaaaacctacgtagtgtaaaatctacctgcaggtaagtgctgatatatataagacgtggctgatcataagaaacaccacaaacgagttcttgatgacactccaaaacacacacgtagacggttcttgtcatgcattttttgttgttggagagcaaataatatcgaaggatagggattttatgtcatgcattttaattttaattcaatcaattatgaaaatatcaacacattgttgttacaagtggaacgctcagcaatttcttaatttaaataagattttgattttttttaaactatagatattttttattggaaataattctgtttgagtcaaataaaactctttatctaaatatttaaaacagaactcaaattgaaaattcttattaaattgaaataaccttacactaattcatatacttgatgataaagtttcattttgagtcttgtgaataattttaaaaaaaatatttattaaaataatctatcagatttttaacatgcataatttaatcatcggaaaaataagtaataattatacatcaatatcatggtaaaataatattgtaaaattacaagagcttttcaccaaaataaatcaaatcaaaatatatagtaaagaattctatacttgcatgcctacaagtctataagaagcaaaatatcaatttaggtagctagagatatgccactattgttaatttatttaccctttgccttcaaggctgactctccaaccacacagacacgaatgtttctttgggattagagagggttaatcggctttactagagaagaaaaatcttggttgatttggaaagtcttgtgctgtaaattaaatgaccccatgggacacttcgcttatatagttgtaaagtacagaacaaactaaagttatggataaacaaataatgaaagcccttcttgcccacttgcaagacaacttgccattccaacaatctcttccaccttacagatcatatttgtataatgatgctaatagtagtaactatatataaacacagaagaagaaaagaaaaaaaaaagagaatattagagaggaggcaaagaacgccaacttgacattttttacactccaagttgagttcaatcaagccaagttgctatatagaggttggttcatatccaccatataaatttaatactaaagtgacgttgtcatctacacacatatatagtacagaacaatccttattgtacagaaaattaaagtccaaatcacgttcccttaatttaacatatataattaatgtaccgtcttcagggtttttaattctgatgttctttcttgactgatacgggatttaagtactatgctttagggctaggaaaaaaataattaagagaagcttcaacgaaacttgtaaccagccatgctcaccgtcacgcaccggctcacacgctgagaatggataagctcaaaaattccaggttacattcaacatttatgaagacttaggtggagaatataaacgttatcgaagattaagaagtctctaactgatttgggtttttacttgatagttacgtgttactacactttactgccggaagtactgtgtcttgtgctttgtttaactatatatatatgcatgtacatgtgaataaaagtggtttgtgatgtgtttaattatatatgcatgtacataaaaataaaattaagcaaatcaaggttattttggtaggtcttaagaaaatcaaatgtgtctatactgataaaaaaaatgcgtgcttagctagaataatttcaagttttcctataatatcttaaacttgttacattaattgaatctaaacactgaacatttacaaacattgccgttaaacacataaattgactctggattttaaaagttgcacaaaattaagtcataacaatcagctttaatttgaaaacaatatgaatattgacgattgtgataaacattcatgtgagatcaaaatgactaaggtttggaagactaaaaagaaagtgcagtaagttctttatattttttgggtacattaaacaataacatttttaccgtaaatttggtgactttaaaacactctctatggtcttttctttctttaatatttgtttggtttgtggcagatttcacttactaggaactgttcaaacttcacagcgctttatccggtgggcatatatcaatgacgaggaaaaataatgagtctcgattcgccaatagaattgttataggcaattagtttaattggaacgggaatttgttcaatttcttaatctccaatgnnnnnnnnnnnnnnnnnnnnnnnnnnnnnnnnnnnnnnnnnnnnnnnnnnnnnnnnnnnnnnnnnnnnnnnnnnnnnnnnnnnnnnnnnnnnnnnnnnnnnnnnnnnnnnnnnnnnnnnnnnnnnnnnnnnnnnnnnnnnnnnnnnnnnnnnnnnnnnnnnnnnnnnnnnnnnnnnnnnnnnnnnnnnnnnnnnnnnnnnnnnnnnnnnnnnnnnnnnnnnnnnnnnnnnnnnnnnnnnnnnnnnnnnnnnnnnnnnnnnnnnnnnnnnnnnnnnnnnnnnnnnnnnnnnnnnnnnnnnnnnnnnnnnnnnnnnnnnnnnnnnnnnnnnnnnnnnnnnnnnnnnnnnnnnnnnnnnnnnnnnnnnnnnnnnnnnnnnnnnnnnnnnnnnnnnnnnnnnnnnnnnnnnnnnnnnnnnnnnnnnnnnnnnnnnnnnnnnnnnnnnnnnnnnnnnnnnnnnnnnnnnnnnnnnnnnnnnnnnnnnnnnnnnnnnnnnnnnnnnnnnnnnnnnnnnnnnnnnnnnnnnnnnnnnnnnnnnnnnnnnnnnnnnnnnnnnnnnnnnnnnnnnnnnnnnnnnnnnnnnnnnnnnnnnnnnnnnnnnnnnnnnnnnnnnnnnnnnnnnnnnnnnnnnnnnnnnnnnnnnnnnnnnnnnnnnnnnnnnnnnnnnnnnnnnnnnnnnnnnnnnnnnnnnnnnnnnnnnnnnnnnnnnnnnnnnnnnnnnnnnnnnnnnnnnnnnnnnnnnnnnnnnnnnnnnnnnnnnnnnnnnnnnnnnnnnnnnnnnnnnnnnnnnnnnnnnnnnnnnnnnnnnnnnnnnnnnnnnnnnnnnnnnnnnnnnnnnnnnnnnnnnnnnnnnnnnnnnnnnnnnnnnnnnnnnnnnnnnnnnnnnnnnnnnnnnnnnnnnnnnnnnnnnnnnnnnnnnnnnnnnnnnnnnnnnnnnnnnnnnnnnnnnnnnnnnnnnnnnnnnnnnnnnnnnnnnnnnnnnnnnnnnnnnnnnnnnnnnnnnnnnnnnnnnnnnnnnnnnnnnnnnnnnnnnnnnnnnnnnnnnnnnnnnnnnnnnnnnnnnnnnnnnnnnnnnnnnnnnnnnnnnnnnnnnnnnnnnnnnnnnnnnnnnnnnnnnnnnnnnnnnnnnnnnnnnnnnnnnnnnnnnnnnnnnnnnnnnnnnnnnnnnnnnnnnnnnnnnnnnnnnnnnnnnnnnnnnnnnnnnnnnnnnnnnnnnnnnnnnnnnnnnnnnnnnnnnnnnnnnnnnnnnnnnnnnnnnnnnnnnnnnnnnnnnnnnnnnnnnnnnnnnnnnnnnnnnnnnnnnnnnnnnnnnnnnnnnnnnnnnnnnnnnnnnnnnnnnnnnnnnnnnnnnnnnnnnnnnnnnnnnnnnnnnnnnnnnnnnnnnnnnnnnnnnnnnnnnnnnnnnnnnnnnnnnnnnnnnnnnnnnnnnnnnnnnnnnnnnnnnnnnnnnnnnnnnnnnnnnnnnnnnnnnttaataccattcttatatttttcttgatttccaattagcaataccattttttaacacatcttttattatttacaaaaaaatatttacaaaatagtataaaatacttattaaataaaaattcagattcacataatatcccgagttttaataattttaattagttaacaaatataaagagttcatttgacccatgtttttttagctcgtgaaaaaaaagagcttttgattaagttagtaagagtttttcacaatttatacagaacttgttcaactcatcctagaatactattttttttcccacttaaattccaatttgaatgtttcaccgattttccaatttaagtgtcatagtcttttgacttgtaccgaggctaaaggagtcaaacacttttctttattaagtttttaggcatttgtggactgtggttaagtttcatgaattattaattaaaacgacacatctattaaatatttttattaggtattaaattatttttaatataatttgatattatagaattttattttattttctaaaattattattgaccaataatatagaatttttaaaatattttatcaattataattaatacttaattttgtaattaatattatataaaaaaattgtttgtaaatcatatttaaaattaatttattaattaaaataatttttcaaataattttttaaatgtatatattttaataattttatgtatttttcttattatcactctaaacttatgttgattaaattaattttccataacattttttattcttataaatttattatttcattnnnnnnnnnnnnnnnnnnnnnnnnnnnnnnnnnnnnnnnnnnnnnnnnnnnnnnnnnnnnnnnnnnnnnnnnnnnnnnnnnnnnnnnnnnnnnnnnnnnnnnnnnnnnnnnnnnnnnnnnnnnnnnnnnnnnnnnnnnnnnnnnnnnnnnnnnnnnnnnnnnnnnnnnnnnnnnnnnnnnnnnnnnnnnnnnnnnnnnnnnnnnnnnnnnnnnnnnnnnnnnnnnnnnnnnnnnnnnnnnnnnnatatatatatatatatatatatatatatatatatatatatatatatatatatatcaaagaactccacaatgtggaagacatgtaattaagttggcttacgaacatttcttgcaagtacagaactgttgaactaaaacaacttcgcttgaacttaagttgcaatctaatttttgtgaacttactgatacttaggtttatgctttatgattgaatctgaattctccattaaaaaatattcaaaatatactgacatttttattatatttaaatatatttgttaagtgtaacataaggttttcacgcttgattacttggacaaggatatcccctacggtttgaaaacggattctacattgcgaaatataaactcattttgtatggtatggattttttttccgtcataagatatattatttttatattgagaggttaatattttttcttttttctgtttttctttcattctcattttatctttttgtcttcgtctcctccatccatcatcaggaatcaaactctgtcgtcatcatcaagagccaacggcagtgatcctaagccaaaacatgcaacaaatcaaaattcatgatcctagatcaattttgtttttaaagaaaaaagtcaaacgcgagcctccattccttccactttgtgcttccattcctttctcttcgtgctctgcctcttcgacccacgaagatagtcaaccgatgaaggccagtggtggttgcaaaggatggacagagatgtagtggtggcacaggtttgacaaaggtgcgatggttacaaagggcttcaattgaaacagttctgactagactcccccattccaaccgtcgatcttgcgcacctccttcacttttggcttcgatggcggcggaggcacggggcagtcggcgaaagattcgccattcctgtgatgcgatttccaatggtttgcggtcttcttcacgcttcgtggtgagtttttgtggtttgcaatggtgatgtggtttcgttcgtccttgaatttggttggtgcgatagggtttcccaatggttcacattaaacacttccagatgggaatttgaagaaagtgatgttattgactgatttctcttcttttctttggtattcattcggtttagtatgttgtttgtaaagagtaattgtgatgaactgatgatctcttttttctcctccatgattttttgttgtcgacggtggtgcatcaaagaattgggagtggggagaagtttctagcttagaaccactaagaacaaattgataaatgacagacaaaaaaagaaaaaaaaaattaacttatgtatcgtgcgaaacgagtttgtgtttcacaccgtagaatccatctagaaaactgtgctatataattataaatcaaattaaagactcattaattatatatatatatatatatatatatatatgtgtgtgtgtgtgtgttttttatgattgtaattgcagaggatcatgatcctttatgcatacatatatgatcagttgcaatcaaaattgaaacagttagaaagagaagtcataatgaaaggaggaaaatcgggacaagtaaactaatttggtcctatagctaatatcaacataagtatggcatttattcaaatagaaacattctcttcctcttctagtacataaaaaaggatttacaatattaaacaaacaagatgaataaataaaactaattgaccacggatacaacaaccgcagattcggtgcaaaagaagcactagcagtactcgatcagactcaccagctattagaatgggaaaaaaatcaaagaagagaaaagaactacatatattatatgtcacattcttcatttcaaccattgccgtctgaccttgagtcctccaaaaacaaatcctaatggtgttggtacccacctatttcaaacacgaaacataacccgaatccgtattcgaaacaaaaaagaaaaaaaaaacacgaacagataaaagaaaatgttcagtgttaacttcccatattttcagcgatctgagccagggactgcaaattgcaccgtacgattgtgtcgacgaaaacgcaagtctcttctttagtattaccgggcggtatgtcaacgacgtacgactcgatgacaactgtccctccgttgctgccgtcgccgtggagcgtggtgacggaccggtagttcctgaggcggtggtcgccgccgaccacgctgaagctcatgacgtggcgctcgtcgtcgaggatctcgaggcgctcggtgctcgacacggcggggagcccggagaccacccgcacctcgcggagcgcgccgacgcgaatgccgtcgttgccgccgccgcctcctgcggcgaccacgtggcagctctttacgaagtgcttgtaggcctgcgggttgtcgaagcgccgcaccaccggccacacggcggagaccggcgcgtcgatcgcctggatcacgaaggagcagcactgattgggccccaccgcgtgcgcgtggtgccgagcaaccatctccgtcacgctaaggcctactttcgccaataaacggcgagttgacggcgtcgtttgtgctggctttggacagttggcgccgtttgcgatggcggtggatgtgtcggttgcagggctgaatcggtggagttgaagagggcaagtcatatctagttcatgtaatgatgatagcaacaacaatataagtatgtgttcaaaacaaagatattggttttgtgatgttatgttaaagtggtttgtgcatatagagatgttgttgttgaatgagcaagcacatatatttggagggtgtgggaagatgagaggctagtcttgctttgtgaggttttggcttaatatttttgtaattcaagttggactttttattttattattatttagtggttatcttttaagcagttgaaatttatttaagaatataacatctcttaataaacattatttcatatatgtatacaaaacaacctaacttctaaattctaatcacatataaaaaaatgttcgataatatatcctctaatatatttttaaaaagatatattttcttaaacatgttatttattattgactaaaatttattaaagttaaaattttgagtaggtttcattttgttattcaataatttttcttttgattttgtagttttaataaattttaattaataataaaatatgctaataaaaatgtgttagataatattttgttagcacttctcattacattacatataagatgtgttcttttgtatatataaatgtaaaaattaaatttttagtcgtgtgtttaagaagaggagtaatagtaaaatatttttcaaggcattatttttaacacattatagaaaatggagtgaggtatattatgtaaaggatgatacttatataggtttaaaaaatttaatgaattttaattcatactaatagtgagtagtgtgttaaaaaaatgtataaggattaaaagtgatgattatccaattaaaaagaagacaccatattagtgaagttggagtggtttgataaagagaaagaaggagagggagggtgaggaagaaagaaagagaagggataattggtagtattgaattgtagcaggcggggaccttacgctaggcgtgcaagtggatcctcaacttgcaactgtcctttagactaggttttgtcaattataccattttttattcccaaacttcaactttgccactccacatattaatatttttttgttaagttgcttaaaattattgttacttaatccaccaaacttttctttggcctcgccgtcttattaaaagttaaaactatttttatttaaataataaagtgtttgtatttttatcgccattttgattttccttgttcaaatttgattgactctagacgttgctgtgtgtcctttttctcgtttctttcgtgtttttccttttgtttcttttggttcattttgtgtttgtttataaatcaaaactcaaaagccgtgcattaattcatagggcatctttggaaatagatcatgtttgaaggaacagtctagaaactccggcatatcaacaagttgatagtgatattgttcaagtggtatattatatatttagtgcaaatgattttaaaatcacaggatatttttcccgtgtttagttttgacgtaaagaagctagttggcatgatcgggaaatacacataaaatatatcatgttgtaaaagtgtttatatattttgttgaaaaattaatttctaatttttacagtgaaaatcatcacccaataaaattttataaatatcatatttaatcatcaagaaatcttaaataaatgtgtacatgttttcatggcgacaatgatttatctttaattttcttgcctttagccttttcttatgagttttaatcttcctcggtcattaaacctaattggtctaacactggtatccactcatttaccacatatttacttaataatctatttggacatatataattgatcactttaatttactcaatatatattaaatagcataatataattattaatacaatatgtaacacataataacgttagaaaatttaatttcctaacaatctccaacttgggctacatattgacctgagataattatatcgtatatccttagtgcgcaactatatgctatttatccttagattcctccttagatacagtctggtcaatctcttatatcaatatgagattatgacggcttttgtcactcttaggctaactaaaccttccatggttatcacaccaatatattcaacaacatagatcaaatatggatgagtggcatgaaaattacatgcaatgtgatctctaccgtgcctatttccaactaatccttctttagtctttatgatatcaatccttaattttctgcatacacaaagcagaaacacaagtacaaaataaacattcagggaaaaaataacatcaaaatctttattatgcagaaaataaacatataaatatctttacatagaacaccgacataaagaactcccactaaatcatagtgtcatcacataaaacaacgctcatatgagccatatgctcgtgaaagaccttaggcactatgcgtttagttagcgggtctgcaagcatagagttcgtccctatgtgttctatggaaatctgaccattctgaattctttctttaacaaccagaaactttatatcaatgtgcttcgattttgaataacttctaagaaaagttgttggagtacaacactactgacttattgtcacaataaatctttagtggtctttcaataccacttactacacgcagtcctgtgacaaaattttgcagccataccttatggttggacgcctcaaaacaatctacaaattcagcggccatagtagagaaagctacgagtgtctgcttaacatttttccaagaaatagctcatccagccaacatgtagacataacctgacgtggatcttttactatcttggcatccagcaaaatcagagtcagtatacccgatgatctctaattcatttgacatccgatatgtgagcatgtaaccttttgttctctttaaataacgcataacccttttagctgctttccaattatccatccatggattacttaattatctacccaatactcccactttgaatgctatgtcaggacgagtgcaaacttgagcatacattagacttcctacagctgatgcatagggaatcttttccatttccattgtctcaagtttattctttgggcattgttcgagattaaacctatctcctttagatatgggcgtatctcctaatgtacaatctttcatgccaaatctttccaaaatattttcaatatagctcttttatgaaaatccaagaatacttcgagaatgatcttggagtatctgaattcctaatacaaaagaggcgtcaccaagatctttcatctcaaaattcttagtgagaaatttcttggtttcgtgcaataagcctatatcgatgctggcaagtaatatatcatcgacatataaaattaggaagataaatttactcccactaaatttatgatatacacaattttccaccatgttcacctcgaaaccataagagattataacttaatgaaacttgtgataccattgacgagaagcttgtttgcgaccgtagatggatttctttaacttacaaaccatagactttgaatctccaaaaacaaagttttctagttggatcatataaattgtctcatcaatgttgtcattgagaaacgatgtcttaacatccatctgatgttgctctaagttaaaatgagctacaagttccataattgtcctaaaagcaaagttgtgaaaaccggttcggtcattgacccagtcgacgtagtgggtcagtgatccaaccggtgggtcagtaattgatccggtctgactcggtttatattaaaatttttaaaattatattatatataagtgtataattaacattatttgattaagaaaaatatattaaaaatttaaaataataattatagtattaaaattgataagaaaaacaagtaaagtgtattaataataaaagagagtgtaaataacaactatttaaattaaaacacaagttcaatttttaatttaaaaaatgagcaaaaaggagtacaaaaagaaaacaaggggggtacataagcaaattagtatctgttggcccatataaacctaaacctaaatcataatgatataaatagagcctgccagtacgttgcgctgcttctcttctccattagaccatttccgcttctctacaatacatgcagcatgttgtgccgattctccatttccacttctcttctccattggaccattttcgcttctctacaactacaatacatgcagcaagtcatatccttatttttactatatcttctccatttccgcttctcttctccattttctctttcaatcgacagtggtggagttgagtagcggcgacgacgtgcacaacccggtccgagtcctaaaaatcgaccggattttcggttttttccaaaaccgtccggttttctccgggcgaaactgggtcacatgcacgcacggttcgataaccaactcggctcagtcatgatactgaatcctggttgaaccggtctaaccgaccgagcccaaccgagtttcataactttgcctaaaagagtcttttgaagaaatcggagagaaagtctctttatagtttatgccttcattttgagtgaaatccttagcgacaagacgagccttatatctttcaatattacctttatgatgtttctgggggttttactgggtgatgattttcaccataaggattagaaattaattttccaacatatttttcataattgtattttaaaagagaatttattttgaaataaagccgtacaaaggtttaaactgagatttcattatttgaaaggaatgttatccttttactaaaatcaaatctttttttataacactaaaatcaaatcttaattactttaaaagtgttcaaggtaataacctcaagttgaaaggatttggattttagaagttaaatttgatatattttaaaagtgagctcaggccatattttgtgttattatcatataacaagttaataattattatgataaatatatgatgttataaaagtgtctatcacaataattattaatttcatcttactactttttaatatttttgtgtatgttagattggtttgatgaattgagtttttttttaaacaaaatattttttcaatttttgaaagattttgatgagtcaatttatcacttctagagtgacttgcctttcctcaaaaaagaaaaaaagagtgacttgcctaacacacttttcctcgttaaaaatatcaatcttttattagagtttgatttttcatttaatttactcatgcaacatttctaacattccatcaagtgaaacttttattgttggttctcatagttttcttccaaattttcaccaacttttgccaacttggatttttctcttcccatttattcaataattaaaccacgtacatttttttttgaaagggataaacataattagtccattatttcattatctaatatcgttacacaatcagaaaaacttttttttttcgtaaaaataaaattacatttataaaaagttgatgaaacttacactagataactttaaaagtcaatacatttttaataaagtaaataatttatacgtggtctttcaatcacaaattattatttatattaaatttacttattttataaaaatcatcttaattaaaagatatatttatcataattcttgttgtgttcatcgtataacaattttagaccaacagtataaataaaaattaaattcttatttatataaattaagatagaaatgcatttttattttggttcaattaaattatgtacttttggtttttgggttcctatataactttaagggaaaaaatgaataaagtccatgtatcattcaaataatatagtatatatctagataatcgcggtaaagtttttaaaagcacttggatgttagcaagttagcaacgatttatcataatgtaagtgccgttgcttctaattaaaaaacttgtgcagtattatcaatgtggaattatatatgttttcaaaaaaaatgtgaaattatatatgatttacacatataattttagctaatgttgtaactcagttgacaatgttgaatttgtagggattgacaagtaaaatatattcttgaaagggataaagagtcttgaatataattaagttctaaatcacttacagttgttattaataggatggaaacaggaaaaatgaaatacataaataataatgcgtgacaaatatgaaaaatattatatgcataatataatgataatctttcaaacaaaaaagatagccaactcttttgtagacctttcgtcgacgatcacttcatctgcaatctcagcaattaagcaattatgtaacataaggccattttcatgcaaacggctgtgccagcatatgcgtgcaattgtcacgaggcaattgctttctgcaccatcaaattgattttctgcacttttttaatctttcaaaaaggctattatgcaatgtgaaattacattctgaaatagcttttgcgaaatataactttatatttgaaaaagactaattttgaacgtaattttacttcattgattaggtaaaaaaataatcatggaaatacagaaaggaactgccttgtcacaaattaacccagctaatgtggtatatgatttgcatcagaaaataatatactatatattaatattcatttaattaaatgatcaaaataaaagttgttattattttgaatgaagattaaaaaatttattgaatgttgtcaatttcattttaaaaaaatgataaaattggaaggattacactacaagaaaaattaaagttaataacaaaacaatttataagcattttttatttatttataagagcgtcattaaaatttttgtgaccccaagttaatgacaaagaagcaattctcgtctctaaattatcttctaacatgccgataaaaaaaatttctaatatgattaatattttactaaacccacattaagagaaggatttggattctgaacgttcgagtaacaacttctttcctgctttatattcttcccgtatgcaattgagaaacattatgcattgcattagtcactattaatttatttttgaaggccaacatgcagacaaagagcaagtacggcagaaaattgaactatgttcatcctctggacttggctcaaggtatatcaaaagaaatttcgcttctcctaccaacaatggcaagtgagttcgggaagctgtttgattgttttgtagatgtaaggtatacgtgtagaatcatggttttaaatagggttctgcaacagtaattgcatctgcaatgtcaaggtattttaacttatcgcaaagcaatcgtaattgtagctgtatcattttcctgtaattacccgcagtataaaggttttctgacttaatataaccgcgattgtgatcgtaaattaaaaccatgatgtagatggaacaggaatttagaaggttatatttagctgaaatcgaatcttctgttatacaatcaaccactgtttgtataggaaaagatttgagttggtcagtactagatagtctgtgtttcattcttgaactgctggtatactaaccagaattatatccgcacatgacagtggcttgtttcttttgtaactaattattctctttgtagcacttcttgtgcattttttaaactattgaatgaggtattgctgagaaaaaaaaaaaactatttatgatttaaagaaaaatcgtttcaatataagcctatgctataaattacacattgatatttttaaaaaacaatttctcgttgctcaatatatatttgataagtaaatagccctacttttattttattacgaaattgatatgaagtaattctatcaaaacgaataattaatttttgttaaagaccataaacatacacaaaatgatttttttttttaaataattaaccatgattcaaatactgaatcacttaattaaggggtacaatccaactgtcacttatatcaatccctgttcttactgtaaatggccgtactagtcatcctattttataatttacaactgacataggagttaatcacttgaagaattaagaaaaagcttagaaataaaataaataaaactgattagaattcaatgccccttttttcctttttggtctcaataattcaccggtacagtattttttttttaagcagttgtaaaattgtctggaataaaaattttaattagctacttgattagaaggatctgaaaactaaatggatatggaggaagccgtgtcatacactttaaagaagcttgttgagaattgagatgtggggttgcgtcccttattgatgctcttgctgcttgggatggtcctgtgttgagcaaggtaagtgtgacttgaatttttttcctttaatttattcatttttaaaatatatgcgtgaaaatgagaaggttaaggtgcattcactagtgatttgaattgaaatacctctttaacacatttgcaattatacatttttaccttctcatttatccaagaaccatatttgcatatttaaaagatttgttaaacagtaacctatcagcttataattaatcatctaggtgtgaatctagatcagctgcctgtggtaatcaaggatgaacatttagaaatgtaccatatgctgaagaacattgtgtaaaatcacaaaggttggttaaacataatgcatgttccatccttaatttgaatgttatgatacaagcctaaatagtatgcaaattgcagacaattgcaaatgtaagagatttaatgcacataatccactcagggacaatataggatagataaagatgtttgattttcataggtaaaagagtatttagtatttaccttttatttgttggtagaagctttttcattcttcatgatcatatggaatgatttagaccggtcctccgcaaccatttccctgagtatatcatcttcaatcttctcagcttgccactgagaagggtcctccacaaaggcctcactgaagatcatgcttgaaacccactctttccaagtggttcttttgtacttatcttcctccaatgaacctgtcatcaagagctgataaacataaacaactttctgctgaccggggcgaaaggcacgggcaatggcttgctttgtttttgaagggttccactctgagtccaacatgatcactcttgaagcagctgttaaactaatgccttcagcacaagcagtgattgaagcaagtagtatctttgctactccaccaggctcctcaaacttgtccatcactctccccctttcaaacagctctagttccccagttagcaccaacacttccctaccttttgtccatccaaagtacttctcaaaatattccacaaataacttaacaggtgcaatgttgtggcaaaatataagaaccttctccttcttgacaacccgatagataaggctcaaaacaaattttactttggaccctattctcagatcaaacttgcatttctctagctccatcaattgcgccggagtgaaaaatttctcagcacatactgctgatttcaccaaccaaggatgtattgaacctagagttatcaaaagctctaactccagtgggtatccattgactttggccattttcttgtgcagtccatgcaaaatctcatgctgtgtatcagttgaattcatcagcaatgtataaatttgcaaaccaggtagaccatcagaactcccaccttcatacacatcaatgaaaccatttgtcacatttctcaacatctttagaccctgccgcctctccctaccattacttgagtcaattttcttagcaatttggtctaagaagaattttctagctcgcgactctaataaatgactcgctttctttgccactttccctttcctcttgtatttcgggtccaatgctttcagtacttcatgaataaactttggccttgccaagcacaaagtgttgaagtactcgcagaaattgttctgaaacaatgtaccagaaagcagtattctcagttctgtctgcactttcatcaaaacttttctcagcctagatttggtgcttctaggattgtgcccttcatccagcaccatgatcccggggctttccctcaataccttagccatgtatttcctgtgtgcaaacttcgaattctctcgcatcaatgttaaaaacgaagtataacccatgatcagaacactcgggtgtgaatgccatttttgtatcttctcaaggcaatccaaaacatgcttgacatcatcagtgggcttaggaactccaggaataaccatcgatgatttctgcttgaatacacggtaggttctacgaccatgaatcagatacactggtataggaatatcccacttgataaattccttgtaccaagtatatagtgttgtctttggagcaaggactagtggccttttccctgggaataacttcaagtagctaacaagaaaagcgatgatgagaaatgtttttcccgctccaggagtatgggatatcacacagccacctcttcttctggatgctgcttccatcaatcccgggtccatggaccctgcaatgttttgccaaagaaactcaaatgctttcttctggtgggcgtgcaactttactttaagttcgggaattaacacccaaacgttatcattttcttgagacacgggtttctcaggagagtcaagagctggcaagagattgatgtcatcgtcttcatcagccttggtcttggaaccttcttcagggctctgcttctcctcttggtgccgcactgaatgttgaatctacaataacaagaagttaatcagatacagattggggagatagacaaattatcccaaaacaggggaatgagcttaatatcatgtacaaattctatgatagattttgcaaacagaaaaaatatctgcctaatgcattatgcatcaagatggtgagttgatgcaacagtgagttagtagccttgtgagttgtgactgtggtcacatgctggatattgtattatcgaagaccacggtgtgttcatggtcctgtccaatttacatgtgacaattagccaagttttatgaccctttctcataaattgaacagctcagctacgtagtcatgtcacaagattacatagccataatccttgctttgtgaaggtattggggagggtcattgtatgcaaacataccccaggcatatgcaaaacaactgtttcaggattcgaacaaatgaccaactgaccaccaatacatgcatagaagaaaattacatataaattcacttaagagcaaacaaactcaaggagatttttttatgttttaaactacacttacaaaggggggtgtaatatatttgatctcagtgctcacaaagccacatctatagcagtaaattccaatttcttcattcattctgaaatcatgaggacaacctgcattcggattttccagagtctcagtgaaaacagcagcatttgaatcctgattaaatagttgaacagaattagccttaggaaaaacaaaacaaaaacaaataggggaaatcaaaggccaaattgacacatacctctgtgtcttcttctagatagcatgatgccaatgacacttccagttctctccacagcatatccatttcagattcttcttctgcatcctctttgccgagcacctcagtttctgtcttttgcccaatgctgcttggtgtttcgctttgcttccactggtcagcaatagctggttcttcattggttggtcttgtattaatattcttcaagtatgaatttatcaaatccttgtaggcagctgcatttaaggatctgtctttataattgtatctctttccttctccatgatctctacttcctaaatatgttgtgcggtgttttttccctttaactactttactggaaccaatcccttcccatttatttccaagattcaccatatcatccagatcacttaaacccttcctctgtgacttaggggcgccataactataatgatatctcgatgacaaatcatcactcttttctccaccatctgactttgcagcatgataatgagactcaaaagttaacaatttaatatccttcttctttgaagtggtaccagttagatgatgatacttggaagaaattttagaggattcattaccataacttctagtaaccttgtcatttagatcatcacaatgcataacttccaccggatcatgttgagcaggaagaggattaatagccagatgattttgatgttcattctgatcatcacctcctgacttcactttctgggatttagttttcttccttttgtacaccacaagctccctgcatgtactcatcttcttgaccttttgatgattgtcagtatccccttctagacacttcttttgtgaactaaacagaccggataatggtatatgcatttcatgatcaatatcatcatctttccaagtgtctatcttaactggtggtaagtttctaaaagaaccaacatcaatctgggaaactttttcgcaaccaagataacgttcaggttgtacattccgacgtttggaacgccgtaagccctcgacattgtaagatggtgattctttatcttcatgggattcctgttcaggatcaaccctcttggttttaagagtagctacttgagaaacaatgggtactaacatgcctttgtcagttttgaaactcacaacatcaatgtgagactcattgttcaatgaagtgctaacagtatcccttcccaaaacttgatacactagcttgtcttgtagagatcttacgcggattgaaaccttctttaaagctgtggtaacaactaaccatgaaagatcacataacacttttcccagaagcaatttagtgtgtgatataatggaacagtcctcagatgatgcccaccggtagtgctgattttcacaaggagtactttcaagtttttggaggatggatatttgattgattccaaccactttgatctccttactgagagttcttagctctgcaccgagtgaaccttgatgaacatagaagttgacataaaactgacacgagcactcggagtcatgaggttttctttgtacagagcttattttggcatcagcccaaacctgcattttaaaaaagaaagaaagtgtaaatccttgacattttggaaactaacattctcaaactaaaacagaggtcttatccaagcagcagcagcagcaacgataataataataagcacagaccaagtaatgcacgaaaaaaaaaaaaaaacaagaaaggggaaaagccagtgattgcctagttaatgcatacaaaataaagtagaaactatttaccatgtaaatgtgctctattttcttatcatctcacaaaatagatcttgaaatcaaaatatctctccaacaacgttgttagcgccgctataacgctgtaatgtggcattttttgacccctctgccatagacaatttgtgaaggaaggtctactatggcgccaccataagccacaatggcgtgtttatatggtggaatttccatcttctgccatatactaccattcactatattctgtcatccgtcattaataacattactctcaaacatataatttcatcaaataagtattgaaaaaagagttaaatatgcgtgcattattaatgtggcagtttcacaccatttgtcaataaaaaatgtcaactaatatgaattttacgataattattataaaaattatcaaatttaccattcatgcttgagaatgttaaatccgtgtatatattatttatccttgagaaagtgtcaaaataaaggaggaatcagagcatatctattgcataaataacacatcatgctcactccttctcataaagaaatttccgggcatagaaaaagttatattgcattgcccatgtgatgctgtcgtaaggcttgtagattctcccaaaaatgtcatgatttacagaattctagaacctcaaattaaacgtataaaattcagtgtaagaggaacacttacagggtcgagattaatggcatctgcatcatcagattgttgaggggcagatagcacacatacgtcaattccaggacgtagaaaacaggagcaatctgataaagtagctttccttgaccttatccgtatatctgacaagggtcctttatccataaccataagatgattatctataaaatgcatggacatagttcctacctcaatttttatgaactccacagcttgccatgagccaaatgcaactgcttcaaaggctgtttacaaagacaaatttgatgaagccaaattggttaaaagaaaagagtatttgctaaagaatgcaaaattgtgaatatatgattctggaaataatagacaaaacccacgttacaaaaaaattggtcaatcaagtttgtcctgtaaattaaagcctcttttgacattgatcaagtttcaaggcatgatgttataaattataattgattggtatttattcttttcattattttacttttcattggcattcattcatagtgatcaattgacccaaaaaaaagagagagagaagaaaggcttacggtgaggactgaatggatgcttgagttgatctaaacgcctttttctgtgtgccattgattgtgacagctaactaacttgtgttgtgagcttctgcagcagtgatttggcacacaaactttcactcacaagactgaagatttcatttcatatctgttcacaaaataaacaggctaatcaatgacatacaaattcagtggatcatatacatcatggcattatacatatcttccaaaagcacccaaaaaagagagatttatttcgtgtatgttgttttctgcctccaaaacataagaggaaaattgagaaaggagaaaatggtgtgcctataaatacgcacacaaacacgttcaccaaaagaaggagaagaagataaactaaaccaagttcaactgtctcatgttttttttcccccaaaaaccaaatcccccaacaaggaaagcacccttatgtgtcaacatgcagtgttagactgttagttaagagaagtagacacattcacacatgtgaagagttctacgcttcagcaaggaattatatactgaaatgacaaagaaaaaacatcattatctgtgatacccacttgtgcatacacagaaatggcaacagtgttatgttgcccaaagggccaaaaaagttttcttttttatggaaaatggttggttttgattaacaagtctccacagagaatccaaatattcagcaggttgaacaagtccatgatcagcaagcatagactttaaatggacttgaaaaaaatgcatgtatgtatgtatgtataatccatcatcaggggcatttagattttctgggaaaggcagaggaagcaaagagtgatgatactcaagtgagggaatctatccttaccaaagggaaaaagctggtgtctgtgttctgagaagaatctaaaacacagtttcaagcatcactgagaagagagagaaaaannnnnnnnnnnnnnnnnnnnnnnnnnnnnnnnnnnnnnnnnnnnnnnnnnnnnnnnnnnnnnnnnnnnnnnnnnnnnnnnnnnnnnnnnnnnnnnnnnnnnnnnnnnnnnnnnnnnnnnnnnnnnnnnnnnnnnnnnnnnnnnnnnnnnnnnnnnnnnnnnnnnnnnnnnnnnnnnnnnnnnnnnnnnnnnnnnnnnnnnnnnnnnnnnnnnnnnnnnnnnnnnnnnnnnnnnnnnnnnnnnnnnnnnnnnnnnnnnnnnnnnnnnnnnnnnnnnnnnnnnnnnnnnnnnnnnnnnnnnnnnnnnnnnnnnnnnnnnnnnnnnnnnnnnnnnnnnnnnnnnnnnnnnnnnnnnnnnnnnnnnnnnnnnnnnnnnnnnnnnnnnnnnnnnnnnnnnnnnnnnnnnnnnnnnnnnnnnnnnnnnnnnnnnnnnnnnnnnnnnnnnnnnnnnnnnnnnnnnnnnnnnnnnnnnnnnnnnnnnnnnnnnnnnnnnnnnnnnnnnnnnnnnnnnnnnnnnnnnnnnnnnnnnnnnnnnnnnnnnnnnnnnnnnnnnnnnnnnnnnnnnnnnnnnnnnnnnnnnnnnnnnnnnnnnnnnnnnnnnnnnnnnnnnnnnnnnnnnnnnnnnnnnnnnnnnnnnnnnnnnnnnnnnnnnnnnnnnnnnnnnnnnnnnnnnnnnnnnnnnnnnnnnnnnnnnnnnnnnnnnnnnnnnnnnnnnnnnnnnnnnnnnnnnnnnnnnnnnnnnnnnnnnnnnnnnnnnnnnnnnnnnnnnnnnnnnnnnnnnnnnnnnnnnnnnnnnnnnnnnnnnnnnnnnnnnnnnnnnnnnnnnnnnnnnnnnnnnnnnnnnnnnnnnnnnnnnnnnnnnnnnnnnnnnnnnnnnnnnnnnnnnnnnnnnnnnnnnnnnnnnnnnnnnnnnnnnnnnnnnnnnnnnnnnnnnnnnnnnnnnnnnnnnnnnnnnnnnnnnnnnnnnnnnnnnnnnnnnnnnnnnnnnnnnnnnnnnnngaatattcttcattaagtaaaaaaaaaaaaaatcaactctatatttttcaaaaagagaattactattaacatagaagaattttatttttttaagaagctaaaataaagactttaccatgtttatgttacctgaatgggaggtaatgatggtgctggaattggggttgttgagcaagaagtgagtgcatggagaagtgagaaaataaaacataataaagtggggcgtgaaaaggtgtgaagtgtgaagaaaaagcagacacagacacagcatagcagtggaaaaatctattttatatatatatatatatatatatatataactaatgagttaattttatttaattattttttatctttatattttttagactattttaattttatttttaataatatttaaataataataattattaaaaaattaattatataaaggaaaattaatttattaatcaaaattagataatcatccacttatgattctctactttgatttggacaatgttagaagaggggtttatacgcggttaaacgcggggccataacaggtactagcttgtaacaacatttgttagtctactgaaccaaacaaaatagactcatgactcaactgaatctgacaaaagacaaaaatattcacatcaacccaatacacgtcactgatgtccacacttgacagtgttttacattttttatgataaaattaaagtaaataaataaaatattaacatagtccttaacatgatttaatatattttaagacattgactgtttattttttaaaataataatgtgattagtttattttagaaattaatatattcattctaaaaataaatatttattagaaatcattttaattaaaattaattatttttattattttaaaaaatagaaaagtacatcttttagtaataaaaaatgtttaaaattaaaaaatcaaataaatttgccttgactttgaatacttattttaataatataattattccctcccctccattataattatcatgtaagaaaaaaaatatgttctaaaataattgtcattttaatttttcaatgtaacattaattatctttttatttatatctcttataatattaataataaataataaaatctataaataaattaataataatatactattaattttataaaattattattctcttttatctatttattatctttcttcataagtataaaataacttaagataacaattatttttgagacagaaggagtatatgaatttaataagcttatattaggagtgtaaaaaaaatgaatgctatcaatcaattaaatatatgactttgaagataattattattttttactttttttaattatgatatttgaacgaagtagtcctctgaagatgacaatgaataaggtttaggtatggtctaataattcccatcctcatatgcattttaagaaaaaaaaatacatgtaccccgacctatacccatgtggctaacaggtctaatcctcattctcttactcactagatatttatatactcttacccacacttgcaactcctactttacttatgtaaaaatttaataaatcaataaaaaaatatgttaattaataattattataagtaaattgaaaatttattattaaataatccaaacatgactttaaaatgcatataggtggttagattaattaatttgtcatgaagtttaattttatttcaagactacccgtgacattaaatggtttaagggatgtttactttttaaagataactttttaaccaatgaatatgcattgctttgctaatagctcaataaatgcaccaattttcatggaaaataagtgcaaatcattaatcgatcttataattaattagggataacaataaattttagcaattaagtagtcttatgttttttataattaggactaagaaaatgttatcttttattttttatatataggactagaggcaatattaaaaacaaacaaacatgacattgatttgtccaaatttaactcataaataaataatattacaaatatcatcatcccacattacaaagataggtcattaaatagttataaatctacactactaatttgaagcatcaaacaacacaaaaaattgattcacaattgaaaaccattttcaaaagaacttgttaacaaattatcaaatttataaataaaaataaataatattttaatattcttaaatacaatgtaaagtaagtttaatataagggattttgaacaggattcattgttctcttttagattgttactattagttataaaattataaaaatatatatttttttataaaaaggtatatgtataatataaattatatgcttaattaacatattttaattacattaatatatatatatatatatatataacacatatatgtgcggtgcaggatgggacaacaagggaactatagtatccataactacacctatgcttgcaaaaaaattgcatgtaaatactcgtctccaccaacaagcggataattatccttcccgcttgcaaatacttttgctggtatcggcagggttcagatccatttttacatccctagtgactaatgtttgtaaaaagtcgtgagcacatataaggtacataattttctcccaacacgatttattttatacttaaggtcatgattcaattcctaaaccacttagttaaaaaaacataagtcactatcacttattttcaatcacattggtataaaaaaactttataaatcaattcaatgcatgcattaattatttttcatagtattaaaggttttttaaattatttaatgctagtattttattttaggtataatacttgtacttttaaataactaaaactataaaagaaattaataaaatatatcaaatatttattactagtattttcaagataatcattaacaattactattatttagcaaaaaaaataaaaatacaattaattacattaattaatgtaaataaaatattgtgaataatattttgaaaataccaattaatttttttattaaatatttttagttatttaagggttcttttggtgatcaaaatagaataagataattatcatgttgtaatccattatttgttatgataattatcagtattttaatttattttgatagaagagcgaattaagaagcaatattatagaataagccatttcctctaatattatagaataagccatttcctctctctctagaggggtcaaattatattgatgtaattttaataactattatactatttataacttgatatagaatatgatttttattgatcaaaccattgaattatatatacatattatcaaaattgtatgtgtcaaaatttatcaaaattgaataataataagaatataatcaaatgatctatattttagtatatcttaaaatgtttatattacgtcgattttaatttatataaatgagttaacaaatgattttggaataatatgaaattttgcatatgtaatatatgtgaaaaaatttcaatttaatattaaattttaagaaaatattatatagataaaagttataaaatgatataatagttattaaaattatactaatataatttaatctctctttatatatatatatataattattttttatcttctatgagaacaccatagaattaaattttatcttgcttttatcctattatattatttatcttattatattctatcatattctgaccaacgaattctaaaaatataaataattttgaaacttctaatattataatataattgatatgttattctctgtaaaaaaaattgttttgatataaaattattgattttattaaattgttaacgttttacaaatttttagtcttgttaattatttttgcctcatacttttatttaaaataattaaattttatattttcaaggagtatgagatttacaccttattttaaaaattattttaacaaaaaataaatcacatatacatttttattaaataaatgtattttaaactaaatatagtattacgacatagtatattttatattccttaatctatatatattaacattgaatattttccagtaaaaaaaagcattgaatatgttttgtgggtacaaacataaaaaataactacatattaaattaaggcaaatatttctcgaaaacacaaagcatggttaagggtgaggtacgtcgaccaaaaaatatcataagttaaaccaaaggctgtgaatgacttgagattggtaaataattgtttcattaactttcatagatgcccaagtggtggggtccacaattcagagactattgccttccaggctccagcagttgcactgttgggattttatatatgttttatgaggggacttgataaattaggatttacgaaattaaagaatttttttttaattcttatatgcttaaatatgaggattttatcatgtaaaaaaaatattatggttttaaataattaaggattttattgaccaataagttattcacaatgttgacaaagaaataaataagtatttttaattaaaaaattaacataaaatatcttagattttttgatggaagtatattaacgataattgtcaatatttttatattttaaatttcttaacgaatacttttaatttatttttttgatagcaagtgaaacgaaaaaagaatttagtactggagttgattgagtagtatatatgagttgctgtaaacttttagtactggagttacactcttacataccaaaaataaaatannnnnnnnnnnnnnnnnnnnnnnnnnnnnnnnnnnnnnnnnnnnnnnnnnnnnnnnnnnnnnnnnnnnnnnnnnnnnnnnnnnnnnnnnnnnnnnnnnnnnnnnnnnnnnnnnnnnnnnnnnnnnnnnnnnnnnnnnnnnnnnnnnnnnnnnnnnnnnnnnnnnnnnnnnnnnnnnnnnnnnnnnnnnnnnnnnnnnnnnnnnnnnnnnnnnnnnnnnnnnnnnnnnnnnnnnnnnnnnnnnnnnnnnnnnnnnnnnnnnnnnnnnnnnnnnnnnnnnnnnnnnnnnnnnnnnnnnnnnnnnnnnnnnnnnnnnnnnnnnnnnnnnnnnnnnnnnnnnnnnnnnnnnnnnnnnnnnnnnnnnnnnnnnnnnnnnnnnnnnnnnnnnnnnnnnnnnnnnnnnnnnnnnnnnnnnnnnnnnnnnnnnnnnnnnnnnnnnnnnnnnnnnnnnnnnnnnnnnnnnnnnnnnnnnnnnnnnnnnnnnnnnnnnnnnnnnnnnnnnnnnnnnnnnnnnnnnnnnnnnnnnnnnnnnnnnnnnnnnnnnnnnnnnnnnnnnnnnnnnnnnnnnnnnnnnnnnnnnnnnnnnnnnnnnnnnnnnnnnnnnnnnnnnnnnnnnnnnnnnnnnnnnnnnnnnnnnnnnnnnnnnnnnnnnnnnnnnnnnnnnnnnnnnnnnnnnnnnnnnnnnnnnnnnnnnnnnnnnnnnnnnnnnnnnnnnnnnnnnnnnnnnnnnnnnnnnnnnnnnnnnnnnnnnnnnnnnnnnnnnnnnnnnnnnnnnnnnnnnnnnnnnnnnnnnnnnnnnnnnnnnnnnnnnnnnnnnnnnnnnnnnnnnnnnnnnnnnnnnnnnnnnnnnnnnnnnnnnnnnnnnnnnnnnnnnnnnnnnnnnnnnnnnnnnnnnnnnnnnnnnnnnnnnnnnnnnnnnnnnnnnnnnnnnnnnnnnnnnnnnnnnnnnnnnnnnnnnnnnnnnnnnnnnnnnnnnnnnnnnnnnnnnnnnnnnnnnnnnnnnnnnnnnnnnnnnnnnnnnnnnnnnnnnnnnnnnnnnnnnnnnnnnnnnnnnnnnnnnnnnnnnnnnnnnnnnnnnnnnnnnnnnnnnnnnnnnnnnnnnnnnnnnnnnnnnnnnnnnnnnnnnnnnnnnnnnnnnnnnnnnnnnnnnnnnnnnnnnnnnnnnnnnnnnnnnnnnnnnnnnnnnnnnnnnnnnnnnnnnnnnnnnnnnnnnnnnnnnnnnnnnnnnnnnnnnnnnnnnnnnnnnnnnnnnnnnnnnnnnnnnnnnnnnnnnnnnnnnnnnnnnnnnnnnnnnnnnnnnnnnnnnnnnnnnnnnnnnnnnnnnnnnnnnnnnnnnnnnnnnnnnnnnnnnnnnnnnnnnnnnnnnnnnnnnnnnnnnnnnnnnnnnnnnnnnnnnnnnnnnnnnnnnnnnnnnnnnnnnnnnnnnnnnnnnnnnnnnnnnnnnnnnnnnnnnnnnnnnnnnnnnnnnnnnnnnnnnnnnnnnnnnnnnnnnnnnnnnnnnnnnnnnnnnnnnnnnnnnnnnnnnnnnnnnnnnnnnnnnnnnnnnnnnnnnnnnnnnnnnnnnnnnnnnnnnnnnnnnnnnnnnnnnnnnnnnnnnnnnnnnnnnnnnnnnnnnnnnnnnnnnnnnnnnnnnnnnnnnnnnnnnnnnnnnnnnnnnnnnnnnnnnnnnnnnnnnnnnnnnnnnnnnnnnnnnnnnnnnnnnnnnnnnnnnnnnnnnnnnnnnnnnnnnnnnnnnnnnnnnnnnnnnnnnnnnnnnnnnnnnnnnnnnnnnnnnnnnnnnnnnnnnnnnnnnnnnnnnnnnnnnnnnnnnnnnnnnnnnnnnnnnnnnnnnnnnnnnnnnnnnnnnnnnnnnnnnnnnnnnnnnnnnnnnnnnnnnnnnnnnnnnnnnnnnnnnnnnnnnnnnnnnnnnnnnnnnnnnnnnnnnnnnnnnnnnnnnnnnnnnnnnnnnnnnnnnnnnnnnnnnnnnnnnnnnnnnnnnnnnnnnnnnnnnnnnnnnnnnnnnnnnnnnnnnnnttagatcatgagaaaaaaaattcttgaaatatattgtgatgcagtgtggtaattaatatgtttgaaaatgactttattttgataatttgttcgtaatttgacaccaatttggtcaatcaaccaggaaaatggtgccaatcaaaataaaaacaaatacaatattagtcgtctctggtaatactatatatatcgaatgatgattctgtaagaaaagtatcattaaatatataattttattttaatttgcataattttatacatgatttaaattctagattaaaaaagtcaccctcagtatataatcgcttctagcggcggcaaatgatagttctataagaaagaaaggatattagaaaaagtaaattaaatatgtaatttcatttaaaattgtataagttcatatcatttagtttaaatattcgataattcactgcataatttcataccagcattagacacctagtaggaaaaagacatcgacgaagattggctctcaaaattgataacttgactcgttcacaaaaaatgattctctggtgtggtacatttgttgccttataaaagcatcaaataataaagacttaataactaatcagttaaatattacaactcttaaaggcagttggtatatctatttcccttctttgcttattcactcttttttcaatttatttttttaaaaaatacactctcatatttacttaaaaaaggagaatgaataaataaagaagggaaatagatataacaaatacactcttaaatgactaagcaaaatctgaggcacaagttagcccaagtataaagcagccgaggctcaggcccttactttatgtccacagaaaaagaaaagttatttatataaattttagggtttgtctaacacacacaaacacaaagtaaaaaaaatgagattaaacaatctcatctttaatgaccaatagaatttaaataattgtcttattttaaattctatcattaatacattgattatcatatttaatgcattatccttaatttctcctctcatttaatgcactatctccttaatttctctctgtctcattttagtcaatcttattaaatatgtcaattatttatatcatcatnnnnnnnnnnaagtaaatataatatatatttttttgaaaaaaagtgttatacttatataataaattaagtaaaaataacaatgacttatatatgatatatgctatatttattatataatataaatttttagttttacacataaataaattagatgagggagaaattaatagatcgagtattatgttaaatgtgatagtcaataataaaattcagaaaaattatttattctattggttattgaagatggagttattcaatcccattgttatttggaattaattagacaaatcctaatttttagtacgaataggtgaagacagtaacaagtggaatgctcgcaacactctctctaacattctctgttcaacatcttctttgtgattgactgaaatttttaaaattatcaattttggtgaatctaatatctaataaggagaaagaataattaaatgatacgtaagaccaccaaaattaataatttttaacaattttgtttaaataaagtttgtttaatttcaagcattttcttcatctaccaaataaactcgatcttcgaaaaatttataaaaatatctacaaattaattttcaattgggcaatgatcaatcttcccttttttcttagccatcaactctaaaattttatgaaatcaaatatctatatgtttggattgcctatgagaaactgaatcgttattaatgcaataacaaatttgttgtcgcaaaatattttcgtaggattttttgcttatggtacatcatttctaaaattcttctcaatcatattacctgtgtaaagcactggttgtttctaatattgttgagagtccaacagtttgcatttgtggcctattagatgactttggtttgtcatgagctgggccaagttttttgtcattttgtttttagttgtcaagaatcaccatcaacttcttttgggactttgaggaccaatcccacacgtatttctcataaagtttcacatctcgattaacaatcaacttctttgtatctgaattgcaaagtttgtgcctttgaatttatcttctagccaataaggatatgcatttttcttctttgttgtctagtttctttctaagttatctggaacatgagcatatgttatgcattcaaaactcaaaaggtgtcaaattggtggtctcctttcactccaagcttgtttaggtgtattgtcacaaacacgtttttattagacacttccttaaaataataacagtaatgccaactactttcgcccaaaactttctaggaatttatttggacttcaacgtacatattatcatttccatgattgttcttttagcaaccaatttggttgaggtgggtatctagttgttagttgatgtagagcgatggtgtacccataatcaaggattaaggttagctacaatagtgcaaagaccataacaaaaacgcgatatattttctttgtcgtaaaccatattattaaacttgtgagtggatttttgaaattgtaattatcatggttttctgatcttattttttattttatttttatttttactttttaagttaatctaaaatattttaagataaattatgtacatatatatatatatatatatatattctaatatttcatataagtttgtcaactatttcttataaaatacataatttagtcatttttctataattttctagatcctaattttatattattttattacttaaaatattacttaatattaaaaaattataaaactagttcaaccacaattcaattatgattagatcattggtcctttaaatcagtgttttcacctgtttgattattggtgtgattttaaaaatattgataattataaaacaaattgatctcttgaaattaagaaaataaaaaaatgatgttttaaatttaaattgtcaataaatttaatccatctatttgttggtgccaactttttcttttcttattattgttggtgccatctaatgttgttaaaacaaggcttagttgccatgttaagtgcttagtttgacagttacttaaactttgttcttcttttttcccaataatattggtcttctaattaacacattagggaactatcaccaacaaaactcctgaaaccaaattgtgtgaagcattcatgattaaattatggaaaaaaattgtaaccttgtcgaagcttgcatctttatgaacatgaacatgagtgttacagttacaatcatcaaaataataaaaaatgttttactaattaaaaaaatagagaacactcataaccagaactagatatctcgttaaagcataatattcttgttagaatctggaagagcattacgaagactatccaaaagaaattaagaaattttacaatggtaaaaatcaattttaagggcaaaaagacgaagtaaagagtcgttgaaatctcttcaaaaacataaaaaacacaataaatcaggccaagtctaatatgaagtccaaaaagcagggttcacgggtgaagcaggaaagtttactgttagatttattaataaaataattaacagacaagattattgacttgttaccgaatagccaaagaccttccttatcatcaactcttccccaccacccaccgtttgttttctaccggttacctcgacaccgtgagccgctacggcttgatcaaaagggtttctctctagtttggctagcacaacggcgctgctgcaatcgacgatcgccccctccaaagctttggcgaggtctactcgagacacttccacgaccgtgccgcaacaacttgttcatcgatttggtgcatcccgaggtcgtgcaagacctcacttacatggtaaactttggaatctgaacttcgtaatctcaaagcgcaacaaacaaggagattgactcggcaagtgccggggatcgttagagaccaaaacaaaaaagggtgatgctgtgatgttgggtttactcggcgagtgcggatactattagagaccaatataaaaatgggtggtaccgtggtgttggatggtggtgggtggtgccagcgtggtgttggatggtgtcgacgtggtgttgagtggtgcaggagagataaaacaacgtagttcacattagatttggcctcgacggtgatggtgatattgtcagaaagcttttatttattttttaaaataaaaattattttttaattatttttcaataaacaaccttttatcaccgatgattttcctgcctcacccatgaaccctgctttttggatttcatattagacttggtccaataaatcataagcgaagagccggagcctcactaaggtaccagttacaatagttataatcgtatacgacacgttggccataacaaaaatactgtatttattatagtaaaccatatcgttaatcagtaatcaccaattcaaagtctagaaataaataccgtatctttcaaacattagctttatattaatatttaaatttatgaatttcaaaaaaagaaattataatataaggagttgcacaacaaaatatacaacaactaagagagagaaaaaagataaatttaaatttaaaatgtaataaatgatattataaatgaaataaataaatacaagatataatgttatataaattattgtagtattatttctctttgaaaatatcatcacaataacttttataaccgagttgtgaaacataaataattaaactgtttgaaaaatgtaaccacaataatttctaaagccaagtcatgtgaaatttcaataactaaatgttcaaataagaatgtaacatttaaagtctacttcttcatgaaagtgctcacaattatgtgatagaagtgctcacaattatgtgatagaaagagagaaagagtcatgaactaaatcaaaacaacatacatgatcatggtttcatttatccaatgactaaagttattcatctattggtcatagatcaagaaaactaacattttcgtttctattggaatcaaccctgacaatttagtcccctgtaaccccaaatagactatgcatatccaattgaactaccaaaaaggacaagtataattataaataaagaacacaacagggacagtaaccaaatttagaatagttattatatatacattccactacttgttcagtttttatacacaaaaagtgagaaatgatataatatacccgaggtataatagttctccatggtacataacaaagaaattttgtatccaaatcagtgctcaactatagtcagccaaaacgacttcaaacagtctactcctcagctccacctatgtagttaaagacagtccaatttggatcccaaaaaacatgtaaatgaaaagaattaacaaatattgtcacagctaaattctccattttaaaaaatcttacagagaattagcatattaaaagaacataaacaaaacacatttcttgtattagttgtatagttgtattcctcttatgcacctatatatagctaaaaaggggacaacaacccaagagactgattactagcagatgctcgaaccagttgaaaatgaggcagatgatatactaatgaacgtagccttctctagtcatccttacttgcttgcatgccctttgaatcagggttcagatcatcatccaaattaagaaatcgtgattcttcccctccaccattataatcccctggctccactgtttttaagaaatctaatccataatcaacacctgaaggagtctgctccatattgggcaaacttcccaacaacttggcatctggattttgcaactgataaataaagcttgaaggtgtatcatccacctggggattaccatctccaggaaaacccatttgtccaaaatccaaaccttccatcaaggcagactcatcaattgggttattatctataagccccaaaagttcatccacctgaaataactcatccgtggaaaacctgttcaagtaatcgtcactaaaatcaaagtcatcaatccatgacaagtccatctgatctttatttacatcctctgcaccctgcccgatatcatgtgttccttctggtctgacatattgaattttcccagccccggggtacatgtgatccacagcctcatccttaggctcttgcttcattatgctagttggtgaggcagcttcataagccttatgacaatcattaaccttatcattcacattgacaagtcgaggattctccttaacatcctcagctgcacaaacctccgattggttggatgtagtactagtgtcagatgttgcagtttctgccgaagaacaagaggacgatgcggccattgaggattccttcaacgattccttaacagaagcataatctgttatgccgggaaaattgaggcgtgcacaaggaccatacatagctctagcagcttcatcataggcaagagcagcttcctgggcagaagagaaggtacccaaccaaagcctgcttcctctattgggctccctaatctcaccaacccatttcccccatgtcctctgcctaactcctctgtagttacactgagagttttgaggtcctcccttccctttcatgcaccctttcttcgaacctttagccggagcctttcgagttgttctactatcatctttgccagaataaagatgttcgttgtattccttccactttgcaatagtctcagccacggatctagtcccataccctctgctcctacttttcctctttctagaagaatccaatggcttaagagaaacttgatcataagcacccatgtcaacaaatccgatacacagacttcgcaacacagtacaccgcaaaactcaatcactgaattcacaatctgttagagaagaagaagaaaaaagcagaacccttcagtaaccaagagaacaaaacagaacacaaaggtggaaaagtataaagaggatttcgcaacacgcacttattagccatagtaataaattcaaccaagaaacgaattttcgtaaaccccaagtaatagataaagctaaaccccaagtaatagaaataaaaaacttgctcagtaagtttgtttttttctcttattttatatacacacatatatataaaaccctataaaagcacgacactgactaataaataacccagaagcagaaccctaaaaataaaaataaaaataaaaatttaaggaaaaccctaaacaaaaatcgcacaaaggaatttggagaatgagaatttagaaacagagttattaagacatgagaaagaatcggaagaatgctactaacctatgcgatactgacggtgtataatctgtgagagaacgcagcgtttttgggcttatctcttttttctagagagtgtgttctgttaggagtgaagagagttttggtttgagtaaataatagtagggttcttgttcgtgaagagagttttggtttgggtaaaaatctctgggctggcaccttggaatatctatttatagccttctctagatatttctgatatttttaattgcaccccagaaaatggtgacgtggcgctttcttagtcgcgttatcatgcttcggagtcccgaaccagctggcacgtggcgctcgaaccttcccgagccactaaaacgacgtcgttttctttatttttccgtcttttccgttatgtacctctctttttgcgtacattctcaattatgccattgctaaacctttttattttattggataaagataaatatcttgtgacgttaatctttgctatgattattattattatatattgagcggaataaatcgaaggttgcagtttcgtctatgttgctgatgtctggaaactgggcctcgtttaaacgaaactgggcccgtagcccgattgtacgagatctgcttgtttacctttaaattggactagtagctttctacataattgagatataaatgacgggaaaaataacaagtaagtttcggtaaattataaaattaactaaaagtcaaccaattttttttttttttaaaactaaaagtcaattttagaagagatggggagaaagaaattgatagttgaaacctaatttaattcattttttttattgttggttaaaatatttattttaatacgtaaaataagatgattttctctttccattcatttaacataaataaggttttcaataaaaataagaaaatagcggtaaaaaaaactagaagacactcagtgatgcatgtgcgataaaataatagtgataaataaccatacaaaataagcgttattacttttttttcttccttctaggcaagcattattacttcctatgttcaacttctttttttatgttgaaagatttttaaatctttaaacaccgtttcattgattttgtaacaaaaaagaaacaccgtttcattgattttagaataaacacgaaggaatctgtagaaaattccaaagtggtagataccaaccgaatcaggtttttttgaaaatttgaagcgatagatattagctttatccggagaaataaactggttttaattttaaactatttattattgaaatgaatatgtggcatacatgtaaagtaggcacatgtcagctggagaatggattctcaatataaaattacttttttatttatttcataaaatagctataatatttaatttttaattaagaaagataacaaataaaaaaacagttaattacaatcttgtaattcccgtgcatgtccaactccaagtagtaaggatcaggcatatcctgtttcctacacagaagtgacccatgcacgtgagacacgtacaacttttatgtaagggaatggtaacacgtcatttctgacttgcggtttgattatatccatatccatgagtaccaaacctaaccgtttgatgaatggtggttctaacttgtatgattccagccagtggatgagaaaattcctgttgactgttgtgtagcggggaaccagttcgaaagcggttaataaatccgttcatgaatgatacagatatgctgacaacatgaatccagaagtgttgagccagtgagactcgtctttgacaacgtgttggaatctttaaactttttcttctcatgctaaaacaaatatcacacacacggcttctggataatttttccagcgtaatcgttatccaaaacataattaatgggtttatttatttatatagttttgatatataacatgtaaattctattaagtattgcgaggagtacagaaaaatgagaggaaactttattacatggaagggcaagttaagaaggtaattttttttttgatgagtttgaaaattttaattgagtgaaaaattattgggagaacaatttaattattcaaataaatttaataggtggaaagtcaataggtgcattttaannnnnnnnnnnnnnnnnnnnnnnnnnnnnnnnnnnnnnnnnnnnnnnnnnnnnnnnnnnnnnnnnnnnnnnnnnnnnnnnnnnnnnnnnnnnnnnnnnnnnnnnnnnnnnnnnnnnnnnnnnnnnnnnnnnnnnnnnnnnnnnnnnnnnnnnnnnnnnnnnnnnnnnnnnnnnnnnnnnnnnnnnnnnnnnnnnnnnnnnnnnnnnnnnnnnnnnnnnnnnnnnnnnnnnnnnnnnnnnnnnnnnnnnnnnnnnnnnnnnnnnnnnnnnnnnnnnnnnnnnnnnnnnnnnnnnnnnnnnnnnnnnnnnnnnnnnnnnnnnnnnnnnnnnnnnnnnnnnnnnnnnnnnnnnnnnnnnnnnnnnnnnnnnnnnnnnnnnnnnnnnnnnnnnnnnnnnnnnnnnnnnnnnnnaaaaaaaaaaaagatgtagtggaatgtataactcttgaagaactgcgctatcataatgagaaggtaaatgtagagatgagacaatttaacatctataagtttcattcgtgaatggagctatgaacctttgtaatataaacaggtcacatgaaaaagacagattaccctggccaaaagcaagagaagagaggtgtgagaatgtgtgctcacttctattacagtgctaaaaaatctcgtcttaagcgtgtgctatcatttcattgtgtaactcttgagtgaaggtacctaagtttgtagaatgatttgggtgatgtatgttttattccaacattatgaaaggtcaaagaagaactaactttcaattataagagtgacaataatatcataaaaagaatgtaaaagaaatttatctgttttagcaccatttttaaagaggaagaatgaactaattgaaaaaaaaaagagatatgcttgtaattgtaggaaatatcgtgaaaatttgttcaaacgtagaattcaaatttagaaaataatttttttaaatagctcatgacctactaatgcattatgcccagaagtaaatgggtttgtgtaataaaagttttgcttgcaatttcaatagaaagaatgcagacttcaacaagaatctaaagatatagctttgtgctttacccgtttcctagctttggtcacaaaagtaaagagttggggccagaaagtttttgatctttgggtcttattccttaaattacttgtacagaatggactaaatataacttgtaacttgttcacagaagtatttatatttttttaaaactagtctagagcacataccttttagttgtatcttaaaaaatatatannnnnnnnnnnnnnnnnnnnnnnnnnnnnnnnnnnnnnnnnnnnnnnnnnnnnnnnnnnnnnnaaatatatataccttttttgtcaagcaattcatagaacaaacatatacaaaaaaagaattcgtggtcaatgaatctaaacgtacaaaatgatgtatgaatacgtgtattcctagtgagaaatcctcgctgcttattgttaaagtagttcttgttgtacttcatctacctttagtaaacaaaaacacactaaaaaatttgttcattatgtctcaagcaaacgtgtattgctagtgagaaatcctcactatttattgctaagtagttcctatttgataattgccaaaaatatttaaatgagatatgtgaatttagaccaatatctcatctcttttcttatctagaactttgtttatgtattttttatgttaaatttgtgactttgtagttatttctcttttgtttgtcattttgataggttaaatatgtttatagataaattattttattggaatttaaagtggattgaaaggcaacttggaagcaagaaatgagaaaggttaaagtggaaaattaagctgcaaaggggaggattttgcttaagccaagacaattttgtcttaaacaaaaacacaatagaatagagagaatacaaagcttcagaatttgcttaagctgaaacttttggcttaagcaaattttaattaaagtgtagatttttagagattttataaatagttgtgcttacctttgtgtacctgatccgtcttgctttgtaaaaataactcttttatgtaaaatatgattctttcttccactttctttcatcttcttccttccatcttgcattttgttactactcatgagaatgagtagctagatttttccatagctttgggttagattgtaactaaatcttatactttcatatattttgtttgaaatatgtttatatatgcatcttgttcttcaatgttagtgttttatctctattcttaatgcttgttattggaaaatactttcatatataacttgattttaggatgagattgtgattgaaaaatattttctttatcttgacttatggtagaatagtcattagctttcagagctaagaataagatgaaagtaattggttatctttggatcattaagcttaaagcaagtttttttgtcaaatgtgtaagaaattgatatttaatagaggaatttagattttttcactaaagaaattagggattaaaatactgtttttgaataacgactgatattaatattgaattttaagttggataatatgcttaagtgtaaagagagtttaatttgatgaaaatctaatcccaacaagctttttcatttgtattttgtttgcttttaagcgttcttattttaaaacctcaaaaacattttaaaattgtgttgctgtttaacatgttctttatctttgaatgtcaaattctatgttttaattgttttgtttgttagtttagatagtaaaaatttataaatttatcaaatattaagtaagtcctagtcggaacgatatctcttatttattaaatactgtttaacgacttgatatgtttggtaatgagtcaacactaatgtacaatctagatcatctaaatgagtattgttactgttgttggatgtcctggtttggttatgcttgattgttccctgatcctcctttgttagcatatccttcgtgtggcccttggtttgcaggtaagttcattttgatagttgattgtttgttagcatatcctttgaaacactacgagaaaattgatataaggtcaagtttttagatttttgtgctatggtcaaaccaaaaaatttacattttcataattatttaaatattgtttttcttataattttttttggtgtaaaactcatcaataatccattcataataaagattatttataacaaccatagttaatattattatataagttatcattaataataacatgactagttaataattcctacattatttttgaagcaaaacaaaattattttatttgccttatgacatagtaaatcacaaatttttgctgcataatttgacacataagctcaggggttggtcctaagattttttgtgccttggaaaaaccaaaagaattatgctatcataattatttaaatattgtctgtcttgcaattttttttatcaaactcaattataatccattcataatcaagattatgtaaagaaatgataatataaataattaatattattctataagttattattaacgataacatgaattaataatctgtacattttttttaaaacaaaaataaatatttaatctatcttttgacataatagattgcaaatagtattttaacattttaaattttgatatacttcttttagtaccacaatgacacatgaataattaatattattctataaattgtacatgcattaggaaaacaattaaatgtcttgaaagagctcaatttcatgcataaagtttgactttgattcaaatgttaaattataatatatataatgactttcaattctttaagatgggaaaaactctgatttctcggacttagtcacgcttatgtcggtcatcgtggaattggtctccgcatttgagtgctataaaattgaaaatcaagcgtagtgaactgcctctccgacaatctcctccacaatcagattacattactcaaagtgacgaaaaacactattacatcatatttgttcacgcttatctatgtgattgcgagctttgtcttgtcatttgccaatgcaacatccttgatcatcaaacacctcagactagagcacagggacaaaccgtgatattccgccacctcgacctcgacaaccatcttcgatctatgccagggatggttcatctccaaccatctcccagatcaccccattgcatttaccaatgtggcagcatcatgtaagctacctcatttgggatcttggagaagaggataaagctcgctctagtgaacatcttgatgcactatctccctttaatcttttgagccaaatttgacaaaagaaaaaagaatccatggatcaaccccatcatctctatcccgtaagaactacgagatcacggcatcacaccaaggatgccttggacatccaagagttgcagaccatccatagaatcctgtttaaaaagtgaaatgcattatccgctctaatggtcggagaaacacaaccactcattcttaaaaaccgatattcgtaagagtaaagagtcagtcaaaaaaaaaaaaggatgagggcaattctctgttcccagttctcctataattatatcatgtagtgaggatttctaccttttttgtaaagcaattcattgaacaaatgcatactacaaaagaatttgacgaaaaatttaatacaaaatgaagctgtgttacaattttttttttgtacaaaatacagttggagagacgtacgaaatgcagctagaaagacgtacaaaaaatcctagttataaaagtgtcagcctaccactgacacaccaaatgcagctgcagacattacactgagagagtcgacatctccaattaatacatcttcaaacagtgctttgtaagtacaagagattgaccagaaaacccacaacaactcccttttgggtctcttaaaaaattccttgatgtatttataagtaaaacaaattcaccctttatgttttcccaaaatacttgttatacttactattagaatgagatggtatgtcaattgcttactcctcaattgacattcctcaaccgggtcaaacatgtataagtatatttggtcgtctaccacaaaaagagcttatatctcaataatcacttcatcatttgtaatcattcaaactactattatttcataaatttgaatatatgatgtttaggctattcagtcttactttgatgaaaatgggtggtgttttaattttccaaaaccatttagtttatttatttattagacacatattattagtgtaaaaatatattttaactatcaaactaacaagaaattattcttactatgattttaaaaattaaaagtaacacattcacgatgtcaatttataattagataagtgcatgtgttatttatttttagtttttttgagttatgttgtgcttagtttattctttttttctgcaattttatcattttaagtttcaactttattctgaaaatatcttactcctaccatgttagtttatagtttgatgatcattgcaacatcaaacacagtactttcatatctgacaatgagtaaattgtgttttttttttttttttttttttttttnnnnnnnnnnnnnnnnnnnnnnnnnnnnnnnnnnnnnnnnnnnnnnnnnnnnnnnnnnnnnnnnnnnnnnnnnnnnnnnnnnnnnnnnnnnnnnnnnnnnnnnnnnnnnnnnnnnnnnnnnnnnnnnnnnnnnnnnnnnnnnnnnnnnnnnnnnnnnnnnnnnnnnnnnnnnnnnnnnnnnnnnnnnnnnnnnnnnnnnnnnnnnnnnnnnnnnnnnnnnnnnnnnnnnnnnnnnnnnnnnnnnnnnnnnnnnnnnnnnnnnnnnnnnnnnnnnnnnnnnnnnnnnnnnnnnnnnnnnnnnnnnnnnnnnnnnnnnnnnnnnnnnnnnnnnnnnnnnnnnnnnnnnnnnnnnnnnnnnnnnnnnnnnnnnnnnnnnnnnnnnnnnnnnnnnnnnnnnnnnnnnnnnnnnnnnnnnnnnnnnnnnnnnnnnnnnnnnnnnnnnnnnnnnnnnnnnnnnnnnnnnnnnnnnnnnnnnnnnnnnnnnnnnnnnnnnnnnnnnnnnnnnnnnnnnnnnnnnnnnnnnnnnnnnnnnnnnnnnnnnnnnnnnnnnnnnnnnnnnnnnnnnnnnnnnnnnnnnnnnnnnnnnnnnnnnnnnnnnnnnnnnnnnnnnnnnnnnnnnnnnnnnnnnnnnnnnnnnnnnnnnnnnnnnnnnnnnnnnnnnnnnnnnnnnnnnnnnnnnnnnnnnnnnnnnnnnnnnnnnnnnnnnnnnnnnnnnttttttttctttttaaacattgtattatgtttatctcttctgacacaaacacacacaaaaagacacttcgctttagaaaagatagggatagacatagtcaaaatcatatttcttaataacattaaccacatggggaagaaaacaaccaacatcaatttaatcaatcgggcttgtgaccatataagatggccttccgtgttgaaatcacaccaccgtctcttttaaacccgggttatctctatatgaaaagaacatcaaaataaaagcaaaaggagaaatacctccaatacagggaaacaacaatgaactaggaaaattttggaactgaactatggtaacaaattcaataattttgattttgattatcctaacatagaggcagatcctcaggagggggctcaatggattgcaacaggcctactccattatccaccaaaagcacagtggccaaaccccacccgatgtgaacatccaagtgacaatgcataatccaagctcctgcacagatcacatcaaccaattatatttcattaaacataaaattgggattaaactaatagattaataaacatctaatgtaaaattttacattatcaatcaatcaaaaattatttaatatatatttttttaatcataaaagttaataaatttacaatatgttttacagtttctactcatttacacttttaatgcataagaaatgattaaatagtcttagattattatgtgtccaccgtagtcctgactaatttgtatgtgatatttttttttttaataatattctattacatgtcatgtgatataagtcgagaccttccaaaacatgtaatgatttctctttggtgcaaaatactattttgatttaagctaattaattttacctgggttgtcagcaacaaatctgataactgcccatccattcactggcacagccacagtgttcctcataggtggatcaacaaggttgaacttggaagtatctttgttggggtcaaaattcccgaacccctcagccacgatgtagaaatcatacccatgaaggtgaatggggtggttctcaggggtcacaatgctagtatcctgcaacacaatctgcaccctcgatccaaacttcaacttggtcactttggtccctggaacaggttgccacagagaacgactcacattaccagtgtaatcaaacttaacaggaggctgcgtaggaaaatcagtggtgaacactccttgcactccaaggtgatgagcctgcaagattgaaacgttgtttgggagaacaaacgagacattgttcatgctggcagtgaaacgcgttccattcggtccctggcattggttcgcattgaaatttttcgggcaattgttgagtccaaggccaatggtgaagaaaagattgtcatcaatttctgcgggaacttcaacttttctggggcttcttaagctgttgctgaatgcagtgactgtgttggtgtcgttgtaggctgggagagacggcataacgggtttgatggacgagcctttcgcgggacacggggctgatttgtattcgagaatggcagtggtggtggtgttgtcaaagggtgcgttttgcgcggattggtaggcacgtgcggctatgtagtagcgtgtgggtggttggtcaccttggatgaggacatcggtggtttggcctggtcccagcatgatgacgttggtggtgaagggtttaaggtaggaggcatcggcaccaaccactgtgagcttgtggttggccactgtgaagaacaagggttggttgagtgctgcattgatcactcttaggaggtttgtctcgccagaatctattggaacaatgctggtgcctacaatattgccaattatcaacaaaataaatgtcgggtttgtgaaactactacaaataatgttctgttttcttagtttccaggatgcaggggtaaccctgtttcttggttcgaaagctttgtgtctagacaagttgtaaattgcatggcgatgctttgaaaaatcgtttgtttttgttcaaagaatacttattttcatgcgccnnnnnnnnnnnnnnnnnnnnnnnnnnnnnnnnnnnnnnnnnnnnnnnnnnnnnnnnnnnnnnnnnnnnnnnnnnnnnnnnnnnnnnnnnnnnnnnnnnnnnnnnnnnnnnnnnnnnnnnnnnnnnnnnnnnnnnnnnnnnnnnnnnnnnnnnnnnnnnnnnnnnnnnnnnaaaattgctattttgttttaacaggggcgtgtgtcttttttaatatttatatcacattaagatattgagtttgttagtgtattagatgttatatttcaaaatcatgaattgttaatcaattaagatattaatttcatcacaaatttaaagttattcattaaaaaaagaggagtcacttattttgactgtatatcttttttatctctctgctaactagttatctctgccaaaaataccaatttccattcctctaatcaaaatatattaattaaatatttgattttaaattttgattttttttgccaggaagtttaatttgtctttaattactatttcctttttttttccaaaaaaattatgtgtatgaaatataacctttgtaaattgtagattgatatatatattaatcgaccaacatagatgtggcatgttgatgaattaaatgaaaagtaaaatatgatcaaaccttggctagaacacttgtaaagatcgccaggttgaccattgacggtgtatgcatcagaaatattaggtgctgctcctgtttgtgtagcttgtctcacaacatcgattgggtttgcgtcccaccactcccctaataatattaatcattatttacaccgtcaaaccatcttaatcatgtgcataatatttgtccaaggaaaaatggaaacaacaaatccaacaatatcattttcttaatcatcccctccacgttttcattagtgccatcattcccaattatattcatatatcatatatgtgaaatacaatcattaccaagaagaattggtgtctcgcgctttggcttagtgaaaggatacgcctctccctctctggggtgaatgattaaagcaccataaacagtggctcttagccatgagctatgagcatgccaccaaagtgttccttcttgtccttgaatggtaaaacgataggtgtaactttctccgggacgaatagggcactgagtcacaaattctggtccatcagcccatcctgttctcatttgccgaattccatgcctaaacacatacaagaaattaacaaggatcaacaaaaactaagtcactcaaacattttttccttcttctaaaagttccatatatatgcatgtagcatgcaatatatatatatatatatatatatatatatatatatatatatatatatatacacacacacacgagtataacgtgccttctataacttatcgtttggagacaagatcaattaaggcctttgttacatttaattctcacaagtgcataaaaaattaaaaagaaactttttttaagtatacccatgagccgtgagcacatgttaaagtatagaagttatctaatgctgatttcttttaaaagagaaattgtattggtacagaaattttgtagtaacgtaaagatgaaaagagagagaatattaaataagatgattgacgtcataagaaaaagataaaaggaagaaataatgttatagaaaatataatatatgaatttgttgtacgaataactgtttttttttataaaataattaatgacatttaataaagtatatttaatggtgaaagccgaaatgctaggttgctttgatacgataccagtgaatagtcacattgtaacgagctttgttagtgactttgacgaccaaagtgtcaccattgttgacttccaatgttgggccagggaattgtccattcactgtgatggtgctgtgggtgttgcacagcctcttcactggcgttgcttgaatctgtctcgttacaaatggcaataaattaattttcttagcaagaaagggacacaagaaagagaaagagagagaaaaaaaaaagtgagggaaagataacgaacaacaaactcatgctcctggattttggcattggctgaatacaatgctgaagccaagacaacaaaaatggctaagaggagggtcttgagagcttccataattcttctattgtgtagcaataaatacctatgtgccaatgatggttaaggttgcaaattgcaatggaagtgatagtgggagaaggatgcttttataggggagaacaaaggagagagcttgagtcattcaggttggcagattaggtaaactttgttatggcaaattggtcagaggcactcttaagaaacttaattcaaccctattaaagttgttgcacccactagttaattacgttcctgaatgcttgcttctcaagtcttcaatttggatgttgaattttctcaaaacatgattactttgagactgttcaggaatagaataatttattaagatgagtttagaataattgactccttttccctttaattggcatttaacgccgtacaattacatcctcaactttttcattactgtaaaagtattcgacatttcaaagggtccacaactaaaaagcatagcaaaaaggtttttttttacctttgctgtccaagtcaagttgtgtcctatgcatctttattgtcaagaagttaccatatggcctgaaatggtttgcctatagcaaactaacatgtaattctgtgcaagtaaacttgccccgtcaaacatattgcactttgtttttatctagtgattcttgttacttcggattgtgtattatttaattgtaagctaagtttggaaagtgaagaaaagtgcaattaattttgtgttagtccaatttgacttctttttttctggtttcggtggttggagaaaataaatcacttgttacaaagattgataatcgctttgatgaaaaagtaatagacattaaaaacaactatgacttctgaaaacatagtctgccctttatttagactaaaactctctgttttagaatgttatcgtcacttaaatatttccttgattgatctataattaagcattaaatatgtggaagaggctgtttcttaagctctcgatctcatgttaggctaattttctgtagggtataccctcacctcttttctttctctaacttttcaagtggctagttgttcaagaattcttatgttagactaaactctctgttttacaatgttatcgctacttgaatattgccttgatctataattaaccaatacaagattaaatgttaaagaggctgtttcttaagctccggatcacatgttaggctctctttagggtatgccctgaccctcttttcttctccaagttgttaagggctagttgttcaaagaacgctcatatgttaggatatttaggctaataattttgtttaattcaagtggctattgataggaaagaaactaacattaaaaatgtaaacaattaacagtgctgccattaggtacgtagcaaataaaatggggtagaatatcaacgtgatttgattgggtccaacacgaatttagttagagatactcatgaaaaaattaggtggcctgtctccctatatttgaaacgtggattatcaactgggaattatagcacaaaagcctgcagtcatactcaagaatacgtacttggatgtataattatcaatatatatcatcactttgactaacatcatcagggagtgatcaccatagcgccacatgttaaacaaaatatcacaggtgacgctttttcagatgtttgactatgtgatggaggatttggtttcctaatgatctgtttgttatgtaacgtattttcataataatatagcccattcaattattaaaaaaccaaatattaactaagtatactgatttctttcacaaattgaaaaatatgatgacaaattttatttggtctaaggaatgggttagatttgtctagaacaagacaaaatttgaacatggcaagtttatatatacttaaatgctatcttatagttgcatctgtgaattagctactttggacactcacaaggatgagaaccttcgatataaaaatgctttgacatagcaaaggacacgctaaaggttggacaagtctcttttagaattcgtggtgacacgaattcgtacaatttataaattcttaaatctcaagaaagatatgtggaacattttcctctagcagtattctcactctatcttcaatagtgcctttgattgagttgataacaacatctagccaaggcctcaaaagattattttggtttgtcacaaccgttacatgctgagaatgaaagcatgtcaattaatggaggctgagtgtgacaaagcttaacacgagatagagaacccaaatgaccaattgaataggtgaacaagaaataaagaaagaacatcatatatgaaagttggtagagtttgttactgactttctcaaattcttgagatggaaataataggaagtacttcaaaagtcgttaaacactgaaaaaaaaaaaaagaagcaagaaagcttaaaattgacacaagagcagaaaccaattccttgtcaaaatttgctggtgcttggtctctctcgcaatagcttttcatttgtctggtaatataattatttctcaccttctattaattcttgtttgggggtgtttgatttcttggattttcatggttagttataagtgggtgcgaacttgagcaattttaattccaccgtcaacattttctctaatccaaaataattagagagattaaagaaattaaactaaacagcaaatccatcatttcttcggtatagaaatggggccttcttaaagaccacgctcaaaatggtatgtttttcctttgttgtaaaatgcacatgtaacggtaatgaagccataaacacgagtttcggtgagagaataatccctacaagttcatcgaactcactataatgctgtatgaacttttatgtgcatgttccatgtgtgacgcatccagcacccctagctctattgatgtcacaaaagacaaaaaatttctctaggctggttggtgtacaatggacaaatcttatacacctagctattttgtatcacaagaatcgggcaggaattaatctcatctcaactttgttaactaactgaattgaaagcttgatttaactagacaccaattagcatgttttgacagactctaattggattagaataagggaaataattgagtaggaatatttgaacactccatgaatctaagggcgctgtttgtttctcttcttagtttttaattttaaaaattgcttgtgacacatcatattcaagtattcaacccaaaaaaaacagctttatttaaataatataattatttatgaattcttaaaattgtcattaattgtttttttttctctaaaaaaaacaaccaaaagaataacaaatggggaaattttccattgattattgtaccataccttaaagttaaagcaaattgttgaaatactttatccacgaatattatgaatgaaagagtaaaaccggaaaggtaaagtgcttgtaaaatactgcttttacatatacatgcaagaaaaagataaatggagtactgaaaacagaaggagggacgagctagcccagaggatgagcactgagtgagatcagcagatcgccaatatacaattaagcaaatattcatcattcatagtcattgtcaaaaaggaaaaaaaagttaaaaataaaataaaacaaaaggttgaaacataattgaggcctttgcacacatgccatccaccttcctaatgatatctcacatgcatgagtcacattttcttctttgtgaaccataagttcttaagaattgctggaagaagccaaaaaccatcattatcactactccaatgactcgtgatttgtgagttgtgtgtttgcactttgcatcgagcagatctataagttttacccctcttctatgctttttgtcttattacacttatctcttcacctttattttcatctatcactgtctttgtaaatctctccctccaaattagcctgatcataacggatatataagcatcttaattaagttcttaatagcagtgtcatctttatgcgttgtgacatagaatagaacattcaatgagtcaggcctgctaccttgtgctattatcatgcatatatgttcacatatatcatctccagaaattttagaaaaatcgcttctggtggattttgttctaaatggagtggagaaaagccaatttgactattagtcatatcagtgtgacaacttgccaaacaagtagaagtccagcaagtgtttttctctagcacaagctcaattatttagagtgacaaaaatcattcatgcccacttcatttttatttttccataggtctcttccttcaaagacaattctatttaagatatgatcggactttaaatgtggacatctctctcaactaggattcgaacctttattcaccattagttccttccgctgagcccaactattggttttcatgccccttcgctgattaatttccaacatatcagattatcaattcaaatccttttctttttatcgagtaattatcaattgaaatgtgaacatactgatttgaacactaagaataaatcgtagcagtacggtactatttattgagcaggtatatatctgtgataaagggtaacttattacttatccggttatccctatcctatttataattttgaatagagaaaacatatttattctaagtatctaaatccattttattgtaagttttatcaatgaacatatgcgagtataaatttttattctattcctaaatgagtagttataagtggataaaattattaacaattcaaatctgtatagtaatcttttgaataacttttctactggcaatcccaacatatgattaacattctgtattaggagtaactaatatcccttttaccacttttctttatcatggatgtactaattacttatgcaaaatgccaagtcaataaccaaatttatgtaatgttccatgttattggactaggcaggttgaacaaaaaataaaattggtcagcttcaacaaaatgttcataagactgtttgatgccttatcaatggattgttatacataacctcaacttggtttttatttccgttgtgttgcgggagggtaaacgtttagaaaacaaatttctgaattctgaaaaggtgagggattttaattagcaatttgggataccaatagtaatgcccatcatctttccaacgtagtgtggtttagtttaatttgggccccaacttgttgaaaaagaaaaatagaaaaccattgcaacaccgaagtaatgccatatcctccaactttgtaagagttcttagatgaggataagtgaacactgctaaactactaaactgtgacattaattaaaaatacgaaaaggaaaaaaatataagatgcagaagagacctgcacaaaatagaataacttacccaacaagaaaatgaggaggccacaccttcaaaaaaatcaaacaaaaacatttttgcttaatgcttcatctccgaagtaacattctttgaagaattattacactagtaacaagaagacaaatgtttcatttcaaatcggcattaattaaagtaaacaccttcacatgctcatcgtttgattgcccatgataaatgtactaattttctttctaagattctgtaatgaaaatgtcatatcctaattattgctatcattaagagaaatatactaaataaattcataaacctttagtcctatcaatgatgacaccctcaatagtaggggtgaacgtgagacgagttgagacttgagatgggataataaaaaattggttagggtcagtttctcgaactcaaaattcactcggtaaattaggaataagattgggttaattcgatttattattataatatatcattttaacattgtgtaaaattaaattgtaggataaaaaaagaataaaatttaaattaagatgtattttataatatatatttctgttacgactatttcctttagcccaaaataacataaggccgaggatcccgaccgaatattgcggatactaaccattatctcattaatatctaggtcattggttttcagcctataaataggagtatatctcatggagaaatgtacacatattctgactctttcttttccattcacacatagcacacaccacataccaattgtgtcgtgttctcttttgagtactttgatcatctttcgtgaggtgttttaccactataatcatcctcagaaagagagagtctgatcccatattaatcacccaacaattctcgttggacattcctattcatttagaacggaacaatttcaaaataaataatatctttataaatataataccatgttatataaaatggtatccattaaatataaaaaattgttaaaattatatatatttgttcaaaaagcttagattttttaaataggaccgggttagagtaacttgaagaacagtttaacttcgtcctcaaaatatactgagtttaattttgaaaacccaaacttgtccaattcaatttatatagcactattttcttaagagagatttatagtagattttttaaaataaaatgaagagagaaacaaagaatgaaaatataaaaaaatgcattaaaagaaattaaatctctgacacatgtcttaatatttaattaactaatttgtttctgtccctaagaaggtgtgatttataagcttgtttgccttttcatttaagatgatattgaatttgaataattgagaaaataggttataaagtagatttacacacagactgttatctttttctttcaacttaaatatactttaactatcttatataactcaattgataaataaggatatgaattattataaatcttttaatatttgaattatttatataattgagtagcataatgtgagtttagactatcttatgaataaaaaaaatatattaattgatttggggttagactatctttcttatctctcatagttaaaattacaactttgtttcataaatatttataaaaaagaaaataaaaagataaaataaattaaactttctcataagttaaaattaatttatatatttaatttttgtaaaagttctttcatttaactcattcaaaagtttaagttatgggtgaagtttaattttgccattacaaaccatcttccttttatctttatctactattctttatctattttttttatctccatttctagattaaattttaatataggaacaagttggtgggttaagtggaattaatctcgatttcttttggcaaagttttaaagttaaattttataaataaaaaaaatataggaacaacaaactccacaaataattacacaaacaacaaacataaatagtcctaaaaacaacaacaaaaaacctcagaataaaaaataaccacacaagaaaagaacacttgttagagtatatttgaaaatcagataaaaaaataagacaaaaatactttcacaaaataatccaaacagaatctttatttttgtttttatttttattttatctattgaatttgtattgaaacgtaagtcagaatatttttaattacaatcaaacatgtaaataatccatctaaaaacattggttttggttgttccaatggtttggcttggcttctttcgtatcaaacgcgtgatacacaagacagacgcgcttctcttggtggttagattaggtagcaccggaagccattccttggccccattccggcattcctaatcctatcatattttttcttacatgcacgagttgactcaccaactcgttcactcttcccttacactcatgactcaactctccttcttcttcaaccttccctcatcatgattttcaattctctttcctcataaccagattctccaaaaatgatgaatcacgattccaacaacgaacaacatcagattctccatgtctcgcaggacgacgagataatggaatcgctaatcctcgatgacgacgacggctcttccgttcagcagcaccaccgtcctacgtcgccgcagagccctaattcccctttcaactcgttcctcgaccctccctcctacgccgacgcgatcttcacctctttcgattccaacggtcacgaccaagccatcgaatcccccgccgcccgatccggctccgaagactatctccacatctccgtcaccgatcctgagaaggagcaggacatcgccacctccctcgtccccggcgccgccaccttctacacctacctcatcaccacgcgcaccaacctccccgaatatggcggcgtcggtgctgagttcgccgtccggcggcggttccgcgacgtggtgacgctctccgaccggctctcggaggcataccgcgggttcttcatcccggtgcggccggacaagagcacggtggagagccaggtgatgcagaagcaggagttcgtggaacagcggcgcgtggcggtggagaagtacctcaggaagctggcggcgcacccggtgatcgggcggagcgaggagctcaagttgtttctcgaggccaaggggcggctgccgctggccaagaccttcgatgtagcgtcgcgaatgctcgacggcgccgtgaggttgccaaggcagctgttcgggggagaggcggagctgggagaggtggctcagccggccaagggcgggagggacttgctcaggattttcaaggagttgaagcagtctgttgccaatgactgggttgggagcaagcccattgttgtggaggaggataaggagttcatggagaggaaggataagttggtggattttgagcaccatcttagcaatgtttctcaacaggttttgtgtttcatggttttagctttagtgtttgttagttcaccatggtgcattttggcaatgagcttaactatgtgcttatttagtaagttcatcataagattaactatggtgcatttgggtaatcagcttaactaagtgcttattcaataagctcattaaaagtttaaaaaatgagcttaactaagtgcttattcagtaagttcattattagctttgggcttccatgttcattagttgagtgtggtgtacttcctctagactcatatataagcaaaaaaaaggtcttgtatgttggacttaaatataagcaaatctaattaattttgtcttatttaatgttattattcgtacaatatccttcatttaattctaattctatttcagtgactcctttttatttatgatagtaatttccaatgaagggcattttagaaataaccttattttttacttgagattaggataattaaatgatgtcaattaactttcttaattagtgtgaaattaattatttttgcttatatgagtccagagggagtatttgggtagtgagcttaactaagtggttattcaataagcttacatggataagatttagtgaacagtgaaggttattaaaagaagttaaagagtttataagaagctttaagttgcttttgagcttaacctaacacctgcttaggcacttaattataagatatgtctaaataattctgtaaaagtacttccaaacactctccgaatgcatgtttggattaagcttattctggggggaataattggtttttgatagcttcttgaaagagattttgaaaaattatggttacttgattgaattgacaaacattcctcttcaagtgttgctgtgattattgaattttgtctaaaatgtgcccccctatttggaatttagataccatgtccatttttgtcatgtggaactgaataaggacaatgttgtttttcactttcgcattgccaagcttgattttgtttatctgcattgacctgcaggctgaatcccttgtcaagtttcagcaagacatgggtgaaacggttggtgaactaggtctggcttttgtaaagcttaccaaatttgagacggaagaagccatatttgagtctcagagagttcgagctgctgacatgagaaatgtggcaactgcagctgttaaagcaagcaggttatatagagagctgaatacacagacaatcaaacatttggcaagtacaaatattcttgtgacttatgatagaaccttttagcttctttataaatgtatggtggaacatgatgatagatgcgttaacctcctgatataatccctaactattttctgttgttgatgagtagtatcttctttatgttgcaggataaactacatgaataccttgggaccatgctagctgttaacaatgcattttctgacagatcgagtgcattgttgactgttcaaacactctcatcagaactagcttctttacattcacgggtggaaaaacttgaagttgcttcatccaaaatatttggtggagacaagtctaggatgcggaaaattgaagagttaaaagaagccattagagttactgagaatgctaaaatttgtgcagatagagagtatgaacgaatcaaggtaacctttgattgggttgtcctctcctttctttggcatatgtaactttgacttttgagcttttatccccctgcatattaactcatttttccctttcagaactgacttttccatattttctttgtcatactatataatgcatgtctccatatttgtcatatactgtagatttttgtctttatttgcttttgttgcatgtgtgcagttatattaatgtaggagaagattttactcaacataactcagtcaatgagtttgatatagtatagtcactaaattttgaacacccttacatcccttgtggaaaaatgacgagatcctattaaattatcataaataaaaattagtattttttcactttgatgataaatttgactctaatattttcactggattttcttgatgcctataatgcaagtgtatttgtagacaagtgtcagggtgaaagaaaaaaagactataatggtggcaaagctatatgttgttgcacttaaatgtttcatcgagggctgcttcttccattaataatgtcaattcatagcacattttgtaacattcaattttgatttctagatctattgccatctcaatatggaaaatccaatgtttttttagatcagactaatatcattgaagtagtgaagacattattggctcatggtttactagtcaaaccatggttgaatggtgataattagataccatttttcatattatataatataattaataaattaacatacaatcatatgaaatcagattaggtaagttttaaattaaaaggacaaaattatttatgtcttgtagaagcaattataagaggttgaataatcatcatcctgaaaggccacatggaagcaaaggatgaccattatattactcaagagcctcaaagtcctacattggacatggagtaaaacatcaacacacacacacacacacacacacacacacatatatatatatatatatatatatataataagagataattacatgaacctcccttgaggttggcggtagttacccttagatactgtttgtttccaaaattacacctacctcccttgtgtctcttgctttgttaattttaagataacgtgcatggtttgtacttaagaataaggaggtatttgtaatttttaaaaataaatggtctttaagcataagaataatatataaaataagggatgtaagtgtaatttctaaatcaaggaaggtttaggtttaattatcactgacttcaagatatatcagtgattcagtgtaaaaatatccctatatgcaaaatataaaatatatattataccccacctagtgggattagactttgttgttgttgtatacccgacgaggaagctttactacaagtcccacacagtatagtgagtggaatattcaggcatacaatatatgtaaaggctgatgctgcattcggtttagaggatagaaatagagaggatggaaatagaagacaaatatttgaattaaagtaaagtgtaaaagatatggaacccacataaaaaccacattatttctcccctctttctctcctcccctcaaagggtcaaacaaacacagcataagaggtaggcaagtcatttcatgtctaaaatatagcgtaagaataatatttaaataaggaatgttagtgtaaaagatgcgaaacccacataaaattcacattatttctcctctgtttctctcctcctcccctcaaacaaacacagcataagaggtaggcaagtcatttcatgtctaaaataaggaatgttagtgtaagttctaatcaaacaaggtttaggtgtaattacccctaatttcaagagagatcagtgtaattatccctatataggttttgattgctccggtttgatgcactgagtgaactggacaagggattggttcgctggtttttcaattggtctggtctggtcatgttcttgttcatgtctccatatttgctttcatttcatgtgtacagttatattaacctagggagaagatttgattcactaaactccttttcaccccttatggaaaattgacaatgcgatccacttaaaatatcctaaatgatcataataagaattatcatcattacaccttgataataaattaggcttgttatctataacgcaagtgtatttagagacaagtgtcagggaaaaaacacacagaaagagactggaatagattcaaacttgatttctatgtccattgtcatctcgatattgtaaaatccaatattttaaaaactgggtttgtgtggttatggttcactggtcagtcggatcattgttgtgaaatattgctgggaagtctttatcatggaatattgtgtcaaaatatcacttgtgatttggaatgtttgcaggaaaataataggagtgaacttgaaagaattgaccaagagaggaatagcgacttcctaagcatgctgcgagggtttgttgtcaatcaagtaaagctcatttatcttctatgttctgtaagctgttacgtttaattggcttttatctttcgtaattcagaacagttactattctacttcatccattttacaggcaggctatgcagagaagacggcagctgtgtgggagaagcttgcggaagaaacagctgcttactcaagagacagcagctaaaatgtacttggctgtaaattcttgtttttgccttttctatgcagtaattctagattttggttccattaatacaatcttatgtagttaaattactttagacgaacttagttttagcccagagttgtatatgcatatatccttttatttttgtcctacattcaagatttcaatgagtttaaactaatcagagttgtacatttcttgcatatatctttttattttcatgttataaattaatgtttaatttttgttgtggacgcagctgagtatctaacccttaatgttttccttagatttattggagagaaagtagaaagaaaagttgacttgaattcataatttacttttttcaatttaaactataaaatattttctcctcccttacaggtctttagttttaacttttaatccgaattatatatattcttttattcacatgtcatatatatcaatgttgattttattttttttgttatggacctacgttgtccttttaaagattgacttatgttaaaacgcattaaacttggacatgagctatttgtgccgttgatttcaccgcagcaattatctacgtatgtgacgaaatagaattaacgcaaacgggggagtttagttggtggagaacaagaactagtttctattatgaaatgaaactgatgaagtgttaaagataacactcgctgaaagcaaagtactatgtacaaacactaggcactccaaacaggcaaaaattaatgtaagaatgaaagaataatagattgtcctacctacactacactacaacgttagtcctaaagagaagcgtaaactcaaaaattgtccacataacacccaatattcattcactagtcgaagggatggctccatcgtcacccgaactgactgctgatatctctggtctaatctcttcaagctgctgaaggacttgctgaacttctggtcgtgctgatggagaaggatcaacacagtgcaaagcaagcttcaacgtgttcagcatctcatcgccgtatgttgaagcatctctcatcaactctacatcaaaaacctcatttgtccactcctctttgacaatggaggcaacccactgaggtaaatccactccattcatagcctcaccaggtggcttccccgttaggagttctaacaagatgacaccaagactgtatacatctgtttttgtgttggcttttttcagcttcgagagctcaggtgctcggtatcccaatgctccagcagtggcaatgacgttagaattagcagcagttgtcatcaaccgagaaagaccaaaatcggctattttagcactcgcattctcatccagcagcacattgctggacgtaaggtttccatgtataatgttctcactggaatgaaggtataacaagccacgagccattccctgtgctattttcatccttgttggccaatcaatggctgtttctggcccacgggctgcacaaaaatggaaaacagtcaaaacaatagtgttaagatattaaacaaatattctaccatggaaagaaaaaataatcatagcaaacttacaatgtaggaaagaagcaagacttccattaggcatgtaatcaaatactagaagcttttctcctttgggtcccaagtaataggctcttaatgccaaaagatcggggtgtcgaattcttcctataacactaacttcagattcaaattctctttgacctttagtgatcttttccctcaatcgtttcactgcagcttgacttccatcctctaatgtagccttgtacacagttccatatgtactctttcccattatctctgctgttgcacacaagagatcatcagctgtaaaggtcaatggtccatcaaaatggactagtttgcctccgacctcgccacccgcttcggctttgcctgcaactggaggaactcctttttctgtcatggcagcagctgctgcagctgctctacctgtggcctggccaccctcagcatttgatgttgctctttttctgatcaagcagaatagcagaatgcagcaaattgttaccaggactacaagaagcactcctgctactatgagaattatgtctttggtgcctaatttcttatgatgacggtgttctgatatttcgggaggtgaaccagaaggagctagggagggacatggggttgaagggctatagccacatagttgaatattccccacaaatgagctcgagttaaatttttgggcaagtagggtgggaactggaccagagaggttgttatgtgaaacgtttaagaaactaagactatgcagattatcaaaggcgactggaatttctccactgagattattcagtgacaaatcaagctgcgtaagctttgaaatgtttccaatattttgaggaatgtggccactaaattggtttctgctcagaactagaacagaaagattatgcaatctgcctaaggcttctgggatttgattgccaaggtggttgttctctacattcaagagagtgagtgaggaaacattagagagagtggcaggcaagcttccattcaagacattgttagaaaaatccagagtctcaagtctagaaaggtttcctatttcatttgggatagctccactaaactggttatgactaagagaaatctctgtaagttcactcaagccgcccaaagaagcaggaatgcttccactcaacatgttatgatctatgatcagatttcgaagccgaaagaagtgatttttcaagctaccaccccatgagttaggaatagagcccgagaggttattgtgttgaagagataggtaggtgagagaagttaagcgagtcaagctagttggtattgggccagacaaggagttaaagctcaagttaagccaataaagcttagtggcattcccaaggctcatggggattgtcccagtgagcaaattattgctgaggtccaaagactgaagcaaaggacatgaccctaacgaaggagggatgttccctgtgaacctattgttgaagagctgaacccctcttagattgagaagaagtccaagtgctgaagggattgaaccaccaatttggttatcatgaaggctaagctttctaagccccctaagttggccaatcctctcagttatgtgacccttcaaccccttccatggaagctggatcacaatgacctgtccctgagcacacttgatgccaacccaagctccagaacaagctccatagccactgtcgttccagcttctcaagaagcctttgggatcaaccagctcttgcttgaacgcttgaagtgcttggaagtttgactgtgtcacaaccaccccatcccaacgctcttcactcaccactggcaccatgagaatccacaaacagaaaaacaaccggaaaaaatgacttgggttgtagtaaaaaaaacattttgaggtcaggttcttgttctccattgcaaacaaaatgaaatatttttaaaaaaaaaatagtaggagaatgaatgaagcaagaaagaagtgaagagaactaaagaagaaaaagtaggagactttgattgattattacttggtgagtcttcttcttctctctagtagtagtagtgtccataagacacacactgtgattggtattgtgagagagaagtgggcatagaaaactaaaacaaagaggaacaagagttggctgaggattttgtaggaatgggaagagaaaggaggcacgtgatggtcataagagagatagtgtgagtggggcgcgaggggtaaggaatcttgtgttgggaagagagagcaaaaactgaagacagacaattatcaggtgggtgtggtggtacagtacaaccctccctcttgcttcttgcaaagacaaacggctagtttttttttttttttccttacaactatgcacatttatttgttcttttcttcaatgtagatgttcttgtctgtccgcaacccaaagtcccaacggctatttcttcttcatcttcgcagtgtaggcccaccccatttcagctccggaccgcaaaactacaaaatgctgccaaattactcacttacccctcacgcttcacctgactacgtgtggatttggatttctggtacaacttccgttttccagaagcatcagactcttgcttttgtaaaatggagtttatcaaccattagatttatcttgaaatttatgcatcatattttgaatgaacattcaaacataccttacatgaatctgatcaccctaaagttaaattaagactttaatatgtttttaatctatgtaaaatttgtaagttttgattttagtttttataaataaaaaaattctaagaaaaacggaataattaattttagtctcttactattatatgacattttttaactgtttatctatttaataaaatatcaagtgactatttaggtaggactgtttattgtagtttttttcttcttctaaattcctaaaaaaaatagtaattctaaatttcggagggataaaagtgaaagaaaaagttcttatagagaccaaaatcaaaatttccttattttataaagataaaaatagtaatttcaaatttaaggaaaataaaaaaataaattttttatagatacaaaaattgaaaatcactgattttaaaaggatttataatatatttaaaccaaaattaatttaagataaatgctaaaacaatacactctttaatacattttccaatcatatttttttaatgattgaaattcatgtaggtctcattaaatgagtcatatttctcacttgatgggtcacatcccgaaattagtaagacacatggaattttatcaatgagcgttgaaaagagcaagttactaactctccacttgatttaaatttaaatggtgaatgaaatattgtaaaataaataaatctaaatcttcttacgttttatagctagtcctccattgtattgtagtaattaaaattttatattttgaagatatcaaatttatttactatttatttaaatttttaatagaataaaaagaagatttgctttccttttgatttatattgaagagaaataggcctgttaaaaaattctagttgggctaaacggttcataactgaaccgggcccaaatatcaattgtccattcatgatagctcgttcacgttacctcgttctgcgttctccttcaacacaaccgcgaaaaccttaactcagagctcgttcaccatacctcccaaatccattgtccaaaatcgcggctcaaaccgaaaattcgaacttgaatcaggtatcgattagaaatctcgttgcaatttctgattttctcatcgattgtgattgttcttacatgtttacaaactgatagttcaacttatactgtttgtcatatttctgttcaggaattttggggcaaggttgctaatgttggcaggattcaggattaactatagttcaaacctagtaattctcgctccctttgattcttcgcaaacttattctaattgttttgtgattttttttttcaattcagcatttgactctgtaggttaatattattgtttgagtgagtttgcttttttgatgtgagatatggagataatttttctgtatccatttacagtttcaatgttgcgatatcttggctcatgttatagttggcatttttaggtttaaacttaagagaattaggtacattggatgcagaattaatttattgtttatcataggaggggtatagaaagagagggaattcataattattggtaacttggcatgggaagtcatggtaaattggtaatggcaactggcaagcaccatctttctttaggctttagtagatttgccaaacctgggctttgaagaatgggctacaagcctacaattggactttcaagccaggtaccttagtgtttttcctctgtctttttggcactaaccacttcttatcaaccttcatgttaacattacatttcaacggatgaaatgaccatggtcttgaaagttaaaaccaaaaggaaaagcaaagtaatatctgtattgcctactagtatacaaggtagaatttaccttgcctactagtaacaacttacgagcttttttgatatttgataataataatatagtctgcataatctgcattttaatgtctttagttgttactattggtaactggcgtgcattgttgtgtgtgtatatacagtcttcctgttaatgcatatagccacccatttaagatgtgggctaattgtttagtatgctggttctaacccactggtgatggtctatattgacagcaactaggtttcaaaaactaatctctaatctgtatattgattattgaataccagatagtagaagaaaaggaagttcagctggttttatttgatagagaaaccactacagaaatatggaagaggaagaggtgaatcgatgccagattcaggaatggtatccaaagttcaaatctgtatccatcaagaccttaattcatcaacttcctgaatcatttattcagtaccttcttgatgactcagggcccttcctgttgcctgattctgtcttaaatgaagatgcattacccaatagaattcataacccggatgaggaagaagattttcaggtgtctgagggatctgatgatgaagcagaagcttctccaccaccttcttttccagaacttgaattgaaaattaaggactccattgagtcccttgggggtgcagtcttccctaagctgaattggagtgccccaaaagattcagcttggataagcacctctggtacccttcgatgcatcagtttcagtgagattgctcttttatttcgagcatctgactcattggtccacgatttgtgccatgcttatgattcatgccagaataaatcttcaactagaccccagaatttctttcttgctctccgtaaatggtatccatcccttcagccagacatggaatttcgatgttttgtacagaaccagaaattaattggaatttctcaacgggaggttactactttttatcctgttttgcttgaaaagaagaatgatctccttttactgatacaggcatttttcatcaatcatgtgagggctaaatttgagtcagaaaactacacatttgatgtttacattacaaatgatgacagagttaagattgtggatttcaacccttggggtgcatttacattgtcattgttgtttacatgggatgaattggaccatattcatagtgaaggaaatgatgtggagtttagaattgtggaagatcgttgtgctgttaggccaggccttaaaacagcagtcccatttgattacttggataccagcccggggagcggttgggatcaatttctaagaaatgcagatgaagagttaagacgacaatctacaggagctggtgcatgataaaagtttttttttttttttttttaaatttcattttgagagttttgacaaagaaggtgaagacacatctttgaaaacattaccccgtagaggatgcagttttccttttagtcttagtctttatggtttataagttttttatattggactcctagttgccattgtaagttgtatccaaatatcagggctcagataatttaatgctgaaacttcagaggcacatggagagctgaggtggcaattgtctatgatgaaaccaaattatcttcccttttaaattttcatatggagaaaatatatcatgtattggttttttgtattattcatgtgcctacttttgtatgtttctttcactgcaaacacttcctaatgcgtctttgttgcatctctttggcaaactcggtacataattctttttgggatcgtacatgcatagttgatcatttcaagtacataactcatttatcattctatattaataatctatacatgatcatttaataattttgttcatgtgctttgtgtttcgtaaacactctattgcttcatttatttttggatggtttgggtgagagatttgtgtgtgtgggctggggtgagtgaaagagggaagaactaggagttgcatgtgtttgtttgtataaaagtgacaagtaaatggtgatggatctcacagaaaatgctcccctctccataaatgagactgcacattatagaagttaggaattagcaagctatcgaaaatatctttatttttttttcttatttcatattatttaggaaaaattttagtaaatttatcttttaataaacattatgttttcttttttttcctacccttcttctcttgtctggatcacatgagtggataaaatttttactatatcttttcattcttatatctctatctaaataatacatatttttatctcatctatcttctttccctccctcctctatcatctatttctttcttatttcttttttatccaaacacataataaaggaaggtatttaagactctaaatataaactttgaaaaaaaaattagagagatttttgagttgcaatggtgttcaggggactagtttcatgtaatttgtgggaatatcttagtttcttctttttttttccttgatgtacatcaagggtaggataatactaaattaataaccaagatgaaatgtcaattttaatcaaagaacaacattaataatatctataatagtacatctaaagtgtatccttaattaatagtgataaaaaaggtatgaagatattacttgtaacatgatttacagtccaaatcccaaatggaccaaatcaataaataattttcacgaggcaaaaatcgaatttgtgattcctcaatgatttttttaaaaaagcgaagtaacgaagtaaatgaattaggaaccagtaattgaaaaagtcaaaacaagaagatactaacatccatataaacaggccaaacactattgttttgtattttttactaaactgacataatcacacacgaactatgattggtnnnnnnnnnnnnnnnnnnnnnnnnnnnnnnnnnnnnnnnnnnnnnnnnnnnnnnnnnnnnnnnnnnnnnnnnnnnnnnnnnnnnnnnnnnnnnnnnnnnnnnnnnnnnnnnnnnnnnnnnnnnnnnnnnnnnnnnnnnnnnnnnnnnnnnnnnnnnnnnnnnnnnnnnnnnnnnnnnnnnnnnnnnnnnnnnnnnnnnnnnnnnnnnnnnnnnnnnnnnnnnnnnnnnnnnnnnnnnnnnnnnnnnnnnnnnnnnnnnnnnnnnnnnnnnnnnnnnnnnnnnnnnnnnnnnnnnnnnnnnnnnnnnnnnnnnnnnnnnnnnnnnnnnnnnnnnnnnnnnnnnnnnnnnnnnnnnnnnnnnnnnnnnnnnnnnnnnnnnnnnnnnnnnnnnnnnnnnnnnagcaaatatgaaacttcattgtttttcagcgtgcaaatttagatgctgactaagaaaaacaaaggctcccttcgctagcgaattaagatcacacatttgaaccattggcttttagactttgacagtatctgaatgatctaattgttatgttcaaatactgtaattttagctccacttcctaaaacacttgccagtcgttccaactcaaattaccatcctcaaatacacataaaatttaaattcatatttgtccaactagtagcaaagaaaacaattggaatggaactccacaaacagaattccaaatgaattccaatataatcaatagaagttgtccatactagaataagagaaatggtgaaatatagataactatggttatcattccatgagaaaacagcagaaaccataacatgagaaaattataaacattaattcataaaaatattaacaataagcaagtacaaagtccaattcactgatagtagattgcttagtatgctcatccgtttctagcaccaagcacatgcacctgaattgttcttatttttcgatcttcttctgatataatttcacagatgcatgcatcatttttatttatcttgttctttttacaaaaacttgtccaccctttgatgcatactcgaccatcatgccactcagacacttttgctaattcagaatatacgggtgtccattgtggcaagccatgatagtctcgtaattcatctctttgagtatcctgtagcaacaaaaaaggcacagaactgtaatttcaaattctcaatacatacaaatgtacctgacatatagttgacaaaatggtaagtaacttctaaaattatacctcgcattggaagcattggcaacgtgaaagggtaatctgttctccaaaagtaagggacgagtccttaatcacattttttggaacatgctgaaataaggaggaatgaagtgaaaagtaagaacatgtaatagttgagttatgaaaagtgaaattgcaataacgaggcttaaagagtgacagaaaatgaagaaacactcaattaacatcttaatttcaacatggacataataatatagaaagattaaaagtgtttacagtccaaaggaatttaacttcaaggagggaacaaaggcttaagcaagtttagttactcgtctaacacagtgctccagggacaatatatataaagattctaaccaattcgttgggtctatttttgaagagctttgcttcaaaatttggatttcccggctgaatatacatttgtggatcaaatccatagttttcaagatgaggaccttcaaccacaggactggaacttgttgcacttaaccctaaaccagataaatcaatcatcaggtaaaagctgattcgcgcactcataaaatacagaaattggaccaaaaaaacaaaaacaaaacccagtttttatcacaaagttaacttttggaagctctacgaggatgagtttgactcctcgtgtattcagcactatgttcttcttcactctcttcttccatttctctatactgatcaccatcatcctcatcatcctcagcttcttcatgttcttcatcatctgtaatctctatcacctcatcctcttcttcagcttctgtcctttcacaccgtgatgattgttcaagaattacaaccttgaaaatgttggccccatcatacttaaaaacaatataatcttcttttcctaaaaagttttcttcttgaaaaatcttccaaccctcttcaaagtaaattttgtttccaaaatgacgtgttttcacattccaaactctcctaccaacatttgtgaggatgacatcctcagggatcctccatccttgtaagcgtgtagatttcacaaaagcatctgggataagctgaaatttatagaaaagcagaaatgttacttaagatctcgtaaaaaaaaatgtggtatatatggcacacacattatgttatcaatataattatatgtaatgatctatatcttgtattacaatattccaagtagaaatttgaagacattaatgttatatcttcgtgtaagtctaggtttgaagtatattaaacaaaataccatgctttcggagtgttcctccggtttgaagactgtaacgaagtactttttggcagccatccaaagaaatttacacctctcttgtgatattccaacaaatgaaatttggtcaagaaattgaaatgccagaacacacagatttatgacatatatatatatatatatatatatatatagcctgaggggtacctagcaaatagtacttccgtataagcactctagtgagtaaggataataatgcattgactgcatgagaacattctattaatatttatttatttttactgtttttaaaatttttgtccatacgaaagaatgctgatccaataaaataattaatatataatctattatcatggataaatattaaagcaatttaattatttattcatttttaaattaatacaaaaagtaaagaaaaaagagagccaccaatatgattagatccacatgtcaatcaatgacaaagaatcagagaaagaaaagaaaaaaagatgataagagttttaaatgatcttattaatatcaatgtaattaactcagataactctttaaagtcttctctcacttttgtctctcattttttttcctgttttttctctctcacatggaaccgtctaaaagcccatacctaaagacctgataaaaaatgtctacactttaaagcctaaaaccaactcaaataattagttgccttcctctaaaaagctcaattaatagccaaaatatcacattctatgattctaccgtgtgttcagtactgttcctttgtctttactcggagataatctttgtggtccttcgcaggtgatgttattacaaaatatgctatttcagaaaagcttaaacaaaagcaactttcagttgctatttttataaataacctacaaactaggttgcttaattaggtctggtaataaaatttcagtttcaagataacactgaaatttgcagcttgcgggctttaaagtatacgannnnnnnnnnnnnnnnnnnnnnnnnnnnnnnnnnnnnnnnnnnnnnnnnnnnnnnnnnnnnnnnnnnnnnnnnnnnnnnnnnnnnnnnnnnnnnnnnnnnnnnnnnnnnnnnnnnnnnnnnnnnnnnnnnnnnnnnnnnnnnnnnnnnnnnnnnnnnnnnnnnnnnnnnnnnnnnnnnnnnnnnnnnnnnnnnnnnnnnnnnnnnnnnnnnnnnnnnnnnnnnnnnnnnnnnnnnnnnnnnnnatatatatatatatatatgagactcacaaaaaatttaatttttttctttccttattatttaatctcaaaaaacgacctctaaatgtcttcccctttaataatatgtgtcaacctcgagaataacaactcacccctggcatgttttctacaggattgcatttttgtactataagtcatcatatatataaacataacttattatacaaacaaacataataacctactcaaagataaataataaaagaacactggccaattttttatataaaagaatgcttttaggtcttaagaattaatgttatataataattattataaaagccatacataccataatttttttattgattaacagtgtaatttttttcactcttacaatgtatgaaaattaaattcattgacatataatattttgtaaaaattcttcattttaaaaatatttttaaattccaataaatttaccttttatcattttaaatttttaatatctgcatttttttgagaaaaataatgtatacataaattaatgaaattaaataaacatgatttatacgagtagtcaaattaaaaatattttcaaattagcctatttaagaaatgttttgataaaattagctaacttgtaagcttggtcagcttgggctaattttctttagatgtttaatgggacaaaacttaagacgccttgtaatatagtaactttttccattaatttttgtagcatgtaagaagaaatataagtttgctggttaagagctgcatatgttattgggaaatgggagctataagatggttaaaaagtatgttgtcgaagaaaacgatggttaacaactaacaagtacataggaagacaataatctgttgaattcgggaaaagtttatatacatttttttaatcttctagttcgttagaaaaaagacattttaactaatgcagagttcgataaaaaaaaaattggtctataatccattataaggtgcactgagttatggaaagagaaaatagaaaggtaaaaaataaaaggtaataatttaataattgatgcaatagaaaaaataaaaaataaataaaaaagtgaaaaataggccagagttggtgtatgtatgcagagttggtgattgccttgtttttctttgggtttcaagaccttgaccatttaattctgagaattgaaaaaaattgtcatcagcctgagagttgagttgataataagtggcaatacagaaaaaggaaaaacattaaagtgcggtaaaattacctttctattttccattttaagaggacaatagcttcctgcaactcaaatttgcttcctgcaactcaaatctggaatgtaatttatattccctgttaatcatttgtgaatgtaaaaaatttacattctagaaagtctaatccaaaatttttagattagacttttcaaaagattaaaaagatgcagaaaataatcatggtggtgcaagaagtaattaccagacaagaaagtccattgtaggcttgtaggccattcttcaaagggatttgaatcttgcactcacatatatgtatcctacacctttcatttttagttgaaaataccaaactacccttcctcgtgcgaactactcctgcgatgacacctctttcaatcgcgattacaacttcttctcccatgacttcaccttcttcagggcagcttccgacctcctcctcacaagtcacgatgttgaagaacctcctcccccctcctccttcctttgcgcgtctccattgaaggtaagaatgcaatccaaaacatgatgtttttgtcacgacaaatttgaaatgttttttatttttaaccattatttcggagacatgattctaaaagctatataatagccttatggaatgaccattccgaaacatagattgagttccagaatacataaaatgtttttttgtttttgttttcaaccattattttttattgttatggaatagacattccagaagctatttctcactattatggaacacctattttgaaaggagagttattttttactgttatgaaacacatattctggaaactattttttattgttatggaacacgtattctgaaaggcggaaattattttttaatgttatagaacacctattttggaagctattttttatgttatggaacaactattccgaaagccaaaagctatttttatactgttatgaaacaactattctggaagctatttattattgttaagaaactcctattctaaaagacgaaagttattttctattgttatggaacacctattctaaaagataaaactatattttattattatggaatatttatttcgaaaaataaaactattttttactattatgtaacacctattttgaaaaggtataatatgaaaatgataatttaaatttttaaaaaaattggaaggtacatgatttagtatgaaaggtgcatgattcaaatcccttcatcaaagcctatagtttggtaactaagctgctagcctattaccatcacaacatgccacaatacacactaaagcccaaacctaaagacccaagatcaacaatatctacactttaaagcctaaaacaaactcaaattagttttcttccttcaaaaaaagctgaattgcaaaggagaaaggtccacacaaatatcaaattctacaatgtaaatgttcctttgcctgtactaggaaatcatctttgtggtcccttatactagtaatgttattacaaaatatgctatttcaaaaaagtttaaacaacaagtaactctgaatagtttttttttttttttcaacnnnnnnnnnnnnnnnnnnnnnnnnnnnnnnnnnnnnnnnnnnnnnnnnnnnnnnnnnnnnnnnnnnnnnnnnnnnnnnnnnnnnnnnnnnnnnnnnnnnnnnnnnnnnnnnnnnnnnnnnnnnnnnnnnnnnnnnnnnnnnnnnnnnnnnnnnnnnnnnnnnnnnnnnnnnnnnnnnnnnnnnnnnnnnnnnnnnnnnnnnnnnnnnnnnnnnnnnnnnnnnnnnnnncaacaaagagaaacaaatttatatgaaaatgagtataagggatatccaaacccttttacgaaataaatagctaagtaactaccctccaatatcctccttcctaatagtggttattttgtatttacatatgtccttggaaataaaaataaaataatcacagtaaaaggattgttattcatcctacaagaaaccagcaaacttatacgatttgattctatagcggtttcaagcattataaatgtcttccgcttaatatcatgtgtcaactgcaacaataacaacttcacccctcacccgtggcatgttttctacacgggattgcattttttgtattaaaagtcatatatataaacttaactgataaaaaaactattataaaacatgtttaaataattgtaaatgatataatacatttatgactatgaatataaagctattttaatatattttaatattcacaattatttttacacataatatatatatattaaaaaataaaaaataaattaaaattataataatataaaaacttacatactataaattaacattcgtgcataatataacgtgagttattacactagttagaataaaatttatttggtttctaataaacaatcaatgataataagagtacaacttatatcatatgataataggttttacataaatttcaccttataaaaaaacattcgttcatgaggtatgataaaactagactaagcttcttaagtgagaatgtatataaaaaaataaataaataaataaaaagtaattgcacattgtttcaatagaaataattataaagacccaaagaccatacgatatgttttgtcttttagtaatatataaagatgacatcttactttcttctctctctctctctctctctcttttgaagtttctatgtctttctctcttcgtcttcttcactcgttcccgatgtgacctagctctgctagggtttattgctttcaattaatatcttgagctctatctgttgaacaatgtagatgatagtagtgtaggtctttttcttgttcttgtttatcttgcattgcaggtgaaggttctctcatgtctggttcaaggaatcggaggagaggaatccaatgaaggttaagtgttgtctggcccaaacaatggtgtaactttgagttgaacactattgtaactcttcttgggatttagtgcaagtaaagggactacagctcccttgcccccttagatgtaggtaacaaggatttttcttcctagtaactaaaccaagtaaatgctcgtgtttcttttcttttattatgcttccgctaatttcattttaagattgtgcacgtaatctctaacacacataaatctatttcaaatcaagaacgaatacaccttttatacaatgcatcaacatcatgttatacgaaaggtaaatatagaaactgcttctcaatgcttctaggttttatttgtcttttaaggcatatttataggttttatgtcttaaaaggcttcataatagttaagcatctaattttattttgtcttaaattaaaaattatgtgttttccctaactagtagtcagggactaattttgctcgtggtacataactattgttggtccaataaaattttacatacatgaagaatcaaatacaattcttttactaattagatcatcattttctcatatgttaacacatcaagaccttatatatcattatgccaattctatgtgttattagttattatgcgtttgattgtgtgtacatcatcaaaaatactaagtaccgaaaataaaggatttaggaaccagtaaatggaaaagtcaaaacaaaaagctattaacatttattagaaaacccaacactattacttgcattgtattcttctagaaaagaattacttgcattgtattaccaaactaacataatcacaaacaaactaaggttggttgaaaaacaaatattaaacttatcgtttatttggtgtgcaaatttagatactggccaataaaactgaaggctcccttttgccagctaattaagttcaccgtttgagctattggctttcaaactttgacaatatttgaatgaccaaattgttattatgttcaaatactgtaattatagttcactttctgaaacacttgcaactcgttccaacatcaaattggttcaccaaactcatgcgcataaaactttaaatttgtatttgtccaattagcagcaaagcaaacaagtggaatttaaccccatcctcgttgagcatgcaaaggtaagtttagctgtggtttttttttttttttttacgaannnnnnnnnnnnnnnnnnnnnnnnnnnnnnnnnnnnnnnnnnnnnnnnnnnnnnnnnnnnnnnnnnnnnnnnnnnnnnnnnnnnnnnnnnnnnnnnnnnnnnnnnnnnnnnnnnnnnnnnnnnnnnnnnnnnnnnnnnnnnnnnnnnnnnnnnnnnnnnnnnnnnnnnnnnnnnnnnnnnnnnnnnnnnnnnnnnnnnnnnnnnnnnnnnnnnnnnnnnnnnnnnnnnnnnnnnnnnnnnnnnnnnnnnnnnnnnnnnnnnnnnnnnnnnnnnnnnnnnnnnnnnnnnnnnnnnnnnnnntttacgaaagtttaacttcatgttaaaaactggtttttgattttccaaattctgtttttatgagtgctgaatcaggctttgtctgatgatttatttatctgccttgggggagaatgcaacaagttccacttccacccatgattgaaggtagtcttgaagagactagaaatttgatccacaaatatattcagcaaggaaaatccatattttgaagcaaaactcataaaaaatagacccaacgaattgtttagaatcatatttcttctagtcctatctcttctaatttgctgagaagagacataaagattctaaccaatttgttggatatattttttaggagctttggtttaaaatatggatttacctaaatatacatttgtgatcaaattcatagtcttcaagacgaagaccttcaatcatgggtcaaaagaacttgttgcattctcccataaaccagataaataaatcatcaggcaaaggctgattcagcactcataaatacataaatttgaaaatcaaaaaccagttttcacataaagttaaactttgataaaaaaaaaataacataaagttaaacttacttttgcaagctctccgatgatgagtttgactactcgtgtattcagcactattttcttcttgactctcttcttccatgtctctatactcatgatcatggtcatcataatcctcattctcatcctcatcctcatcctcgtcctcgtcctcagttgcttcatgttcttcctcatcttcagcttctctcctttcacacagtcatcattgttcaagaattacaaccttgaacacattgatcccatcgtgcttaaaaagtagaaaatctgtttttcctgaacagttttctttttgaaaaacctgccaaccctcttcaaagtaaattctgttccaacaagaagtgttttgacattccaaatactcccactaacttttccgaggatggtgtgtagacttcacaaaagcatttcggataagatgcaatttgagaaaaaggagaagatgagtgttactttagacactataatactctggtaatgttttgaaatcaacaaatacattggtataaagcaatgtaggctacatagttaaatctcagtaaatttatgatccatacaatgtaccacaatattttaagttgaaatctgaggacatcaatgttaaatcttcatataagcctacactgcagaaagtataataataaaaaaaaagaccttgctcatttaatccaatgaaaattgaaaaaaaaaattgtcaccaacctgagagttgataataagtggccaataccagaaaatactaaaaggaaaaacactataaggtgccaacatgaaagtccattgcaggcttgtagcccagagtttagtccattaacatcacaacatgccacaatacacagttaaggcccaaagggaaattaacatcattatgatccttatagcttattgaacaattctattatattgttgttataaaagacttttttttttaatgaatactcaatcacagatcgggttaagaataaaattaagtataggaattaagaaacgttccttcattaattctcattttatgtgtcacttttaaaatatttctgtattaattgtcattttaaaacataaaaaagtatcaagtacgtttttcaatatatttatgggataaacgtattttgattaaataagattttaacatatgagaatagatcacatcaaattttaacatgtgagatcccattttcatctgttattagatttaaccaacaagcatctaattccttccacttctcccttctgcaatctatacctcgtaattttaatggcatcagcaaaaattctcacctaacagcaccagacaaaaaacaaatccacatatacatccatcattttcttttattttgtctcttttacttatgcaaaagcatgcccactatttaatacatacatcaccatcttcccacttgcacactctcctgttacttacaattttttttcatgtctcttgaagaaggaacatgtaatagttgttagtaatgaaaagtgaaattgcaacaatgaggcttaaagagggacagaaaatgaagaccactgaattaacattttcaacgtacatgaacaaaattatatacagaaattaaaatttaaaagagcttgccacttacacattcccaagtgttttttgcatgtgagttgtggcaagcagagaagaaagtctcatcattgatatagcaattaatagggaggaatgaagccataagtgaaaagtagagtagatggaagaaggaacattgtgcagtgtacttggtgttggtgtgagttatgaaaagtgcaattgaaacagcgaggtgttaccacttaccaggcactgtttttttcttctgcagttgcttttctcttctatattccgctctttctctaactttaccacaattcttccatacatgttgataattgaaaggtgatgatttttaagtcattctctccttatactgaaaaattaaacagtcttttctatatgctgtttttaaaaaaatgattttctagtttttatatataatgaaacaataagttcaaaataataatccttcagccatcaacagtgtatgaaaagaatgtgataaagttgcagaggaggaaaatatagaacagaaagcaggtatagaagaagaggagattgagattgcaaaggaagaggaagacactgaagatgaggaaatatgatgatcactgattctgaagacaacaacgatgagtatacatgatccaatatatatagcgtgagggttatttaattttgttggttttaattatgacagataatgaataatataaagagtgtgatggaaaagaataactaactactgaaaatataacttattattaaaattttgccttttaatatattattcataacaaattcaacaatctcctaaaatcaagtaaaacagactttgacttatttaaaataaaataaatagataattttaatcagttctaaaagtaactggtaacaaatttgtttatttttgtttataaaagataaaaaaaacagaatttacaacaactcaattcctatcttggtcaacaaccagcgttagactcgtttgacatgagctatctaattagagatctaatatatatacacatttaatatacttgtataattaaatgagtaagggctgtgcattttatttttacagtttacatctctaattaaatcagtaatgaccctgcattttgtttttactgttttaatttttatccatatgaaagaatgttgannnnnnnnnnnnnnnnnnnnnnnnnnnnnnnnnnnnnnnnnnnnnnnnnnnnnnnnnnnnnnnnnnnnnnnnnnnnnnnnnnnnnnnnnnnnnnnnnnnnnnnnnnnnnnnnnnnnnnnnnnnnnnnnnnnnnnnnnnnnnnnnnnnnnnnnnnnnnnnnnnnnnnnnnnnnnnnnnnnnnnnnnnnnnnnnnnnnnnnnnnnnnnnnnnnnnnnnnnnnnnnnnnnnnnnnnnnnnnnnnnnnnnnnnnnnnnnnnnnnnnnnnnnnnnnnnnnnnnnnnnnnnnnnnnnnnnnnnnnnnnnnnnnnnnnnnnnnnnnnnnnnnnnnnnnnnnnnnnnnnnnnnnnnnnnnnnnnnnnnnnnnnnnnnnnnnnnnnnnnnnnnnnnnnnnnnnnnnnnnnnnnnnnnnnnnnnnnnnnnnnnnnnnnnnnnnnnnnnnnnnnnnnnnnnnnnnnnnnnnnnnnnnnnnnnnnnnnnnnnnnnnnnnnnnnnnnnnnnnnnnnnnnnnnnnnnnnnnnnnnnnnnnnnnnnnnnnnnnnnnnnnnnnnnnnnnnnnnnnnnnnnnnnnnnnnnnnnnnnnnnnnnnnnnnnnnnnnnnnnnnnnnnnnnnnnnnnnnnnnnnnnnnnnnnnnnnnnnnnnnnnnnnnnnnnnnnnnnnnnnnnnnnnnnnnnnnnnnnnnnnnnnnnnnnnnnnnnnnnnnnnnnnnnnnnnnnnnnnnnnnnnnnnnnnnnnnnnnnnnnnnnnnnnnnttctttttattattttcttgtattttaaaattataattctcactcttttaacaattttaattcttctcttacttttaacagtcttttttctctcacttccaagactaatgtagacgaaaacactcctctaaagtctaaaaccaaaacataaatgcccgataaaaataaaaataaaaaattaaacatctttgcgagtttatgacataagaagatggttcatatgcattgtgcagtgcactaatagtttcagatgaaggcgttattatcacctgataaccatgatagctagttagttgactataacagttacttagtttagttaactttgcttatctggcaatacttatctgaatacttttgtatatgagacacaatacaatatctacatagccatgtatgaattgaatcattctttctataagaaaataatgagaactccattttctctcggtttctatcaccgacagttatgatgcaaatgctgccttcaatttttatttgtggtccctcactaatttctgaaaatgtttaatcaccccaagcaactttcagcacctagcttttctatttttatgaataatctatggcctatagtatatatgactgtgactatgaaccaggttgcctaagttaggtctgatgaaataattgcaatttcatgatgacaccgaaaacttcttcaacaggcttgtatggttagattcccatccgtattaagtattaattaatggacaatggcttatactttataagagagaaaatagataacagccatagtcattaacatagtcatcataaaatttaacgtaacattacttactctagcaatacttttagtattgaaataatttttttgtcaagttcttaaatttacatgtcattctcagcctcacaaatttaaaataaataatctatttaaacaattatacattataaatgtcgtatataagtgtttacaaatattgataccaattttattttgtcaataatgtgcatgtttgattaaacatttgaatctctaagaatatgtttacccacaaatccaaaggatatttttctccattcgtttgttagatgtctatgggaatgcatgtcactgcatcttcatcagaaatccaaacataaacaatatatgggatttatttttttgttgaaaataataatatctgtaattaatatattgatattccctccatttctttcgattgtccccttaaaaagttaatacaaagattaaaaaaagtaattaatatttttttttgtaaaaatatttttaactttagaatataattttactgttattttctctcatttatcataaatgtatatagtatttaagacctaaatgaatagaaggacataattaaaaaatggattgataaaaataatcaacaggattatnnnnnnnnnngataaaaaaaaaatatttaagcaaacattaatatataccaaataattaattaatgggaagcacttaaatacaatattagagacattattagtataattttccagtcaaaatcagcaatttaccatgacaatcactcctttcatttcctttacaatcgatagtaactattaaaatgatgtgccaattttgatcacagaacaaggttaataatctccaaaataacttatttaatttttgtccttaactaatattgataaagaaaaaggtgatctcagtaatgaagacgttacttgaaacatgatttactgtccaattgcaaaatcaacaaataattttcaaaaggcaagtaccggattttgtcttgcgccttttgaatttaattatatttcaatatctccctaccttgctatggacatgagtggagaacatttttggaggaacttaattgatatgcgcaaagtacgttattgccttgttttcttttggtttcaagacctggtaattttattcattgaaaattgaaacatactttttctttcccaccaatatcgaaacttgaaacatactcttttttttcaccaaaatttgaaacaaatatagaaatttcaagacctgagggttgatatggtcagagacagaaagacgtggcttgaaacatgaaagtctaattgtaggcttgaagcctattattcaaagcctagtcggagatgcatttgaccaggaaatatcgtactagccattaccttcacaagtcacaacattttctttctcacaacattctgtatctctgtgtgcatcaaatgcatccaatagctctaagaacaaatattattgttgttacaaaaacattttcatgaattttcaatcatagatctagttgaataaatttaagtaaaagatctagttgaataaaatctgctactcaattattctgcacttgaaaggcttcataataattacttaattaggggtatggtttcgtgtacaaaaaaagaaaagacgaagtaataaagaaaagaaactaggaaccaataatctaataagtcacaaacactcttacttcgtagactctattaccaaactgataatcacaaactaagattatgcaatatgcttctttattgtgaaggaagtcgaccgataaaatgatttctgagtagctgcaacttgaaaaacctcaaaactttctgcatcatatacgttaactatcttatcttatctgaccataagcaccgaaaaacatctgcagctcttaatcagtcaacttatattccttattacatgttacaaaaaattaatgaaaaaagttatatactccaactccaagccacgggtccctcaactaatttcaacataaaaaattacactaaaaacacttaaattttgtcccattaaacatctaaagaaatctatcccaagctgagtgaccaacccctgaatacacgcaattagtcaacataaagctgttacactcattaaaaaaaataccaaatattctttaacttgatagataataaataaattatacaagaaaacaactcaatacatctgaaaaattccaatccaaaaaattccggaatttcttcctacaaccgacaatctcatctttctggccaaaattcaccaatattacattgaacatcatagaaggcttccagaaacttgaatatgctgaactttttcaatttatgtatactacatttcaaacaaaatagagtacatttcagtttaattgaaaatccagtctcattctctgactctctagtccaattccaactattaaaacgtaccattacgacaatggaataaaaaatgcacatacaaatctaccgaaaatgacgaacaatttcagaagcaaaatcaatgactacgctgctgcattacttgaggtttaatagcacaataatatcttggcgtaaaacaaaaagtagtaacagaactaaaccccatgcaattcgctttggatctaaaaagacaaagaatatcgcaacaatttcaattcaacatattacaactaaaaaggccgaaccaacctgagaagaatccaccgaacagaccggccgtccagatcctgccgtttacacgcgcgcgactgccggcgcggcggcagaagcggcggcggcgccgaggaacgagaggaatccggagctgttaggctcctgatcgtcgagaaacagatcctcgggaacgcggaacgcgccgtgcgcgcacacgatcgccaatccaaccatgagtgcagagatcaacaaggatccaacgctggtgaggaaaatgacgaacacggtgagcacaacgaggatccctagggtttcgcgatcggcgaaggtgcgtccgaagaggatgagaggctgatccgaagggcgaaagaggtaaaggaatgaccacgacgcgaggagaccgaagaggacgagtagcgagaacggatgcgtgatgagcgagaccgcgagcgcaaacgcgattagggttaggtaattgacgcggaagtaggcgaagttcttgcggatccgagagtatgcttcggcgagggtgtcaggtcgggacatggagccccggtcgatgagctccgtccacgggcgacgctgcgccaaggcgtggcggagcgacgaggagatgcgggagatgaaggcgcggaacgccggcgtcgcgatcggaggctgggactgcgaggtgccgccgccggaagcgctggattgggaggatatagggagtgtcggtggagaggccatggtggcgcgtgaatctccaattgccgcgcgtgaaccaatagagagagcgaggggcaatggagactctgtggttgggcctttcgggtttgggaacgaggaagagcacgagggggctgttagtatgtaaatgtaaatgtccgaaaataaccttcctaatgtgagatgggcatgcgtcgaacctatttgcagaaaacgcaacgcaaaaaatacgtaataatgtggacaaaaaataagttttaaaaaaataagaaccaaaataacgtcaatatgtgtaataaggatcataattgaaatttgaaaagaagcaatcagtttttattttaatttaattaaaatacacatattattttttattatcatctaatcataaaaaataattaaataaatattatttttataataattaattaaaagtcatgacaagtataaatattaactatttttttcttacaagtcataattaacacataatattgaaaactataagttactattagtatagttttataatattatattatttatttagtactagggaaattatgtgcacttttaatccttcatttattaatataatatatattaatccctcgtacattaatgttatatacaatgtatttttatacaatcaaatgaacaagtaaaaatttgacaaagtaattttcacgttaaattagattaaataaaaataattacggtttcctatataaatctttcgggaaaaaatgtaaaataagatcatatttttaatttaaaagaaaaaaaaaatattttcttaaactaatgaactccttaacgttctgtttttgtttgtatgtcacctttgtcttttttatatgaaaaatatcaatatttaacagttgtatctatctggctagacgtttgatacttttggtgggcaattgctttctacacctctcttttttttacttcttgtacctccaaaaatgtccaaacaaacaacaatacctcctccacccaacaccaccgtgccccacctccacccaacaaccatccaacaccactgttgatgactctgactctggtgctggtgtggggaaaaagtcatgcatggagtcgaggacacgagagaagtggaagtaaaacgtgataacattttgaaaatgttttttctgaaaatatgaattttttttaaccttttaaaaaattatttttgaaattatgttagcataataatttaaacttttcataattatgctaacaaaatatcgaaaatacatttccaaaatgttattatattttttacataatttcataccaaatacccatgaggctgtaagcccatgaccattttacacacaactcaacaatgtgttgagtagtttgagagattttatataactattgatgaggtgataatttgaataacccttaaaatttaaaattctcaaaattagttaaaatttgagaaaaacttgtggtttgaccattacatcgagtcctttttaagaggaattacatcaagtcttagggggcgtttacttgtagtttttattttctgattccattttttatttttacttcttaattataaattttttatttatttttaatttgtttcttatttttaaatatttatacagaaaacattttttttctctgttcaaatctttaaaacacagaaaatagattaaaaataagataacaattttacaattaagaaataaaagtacaagtaaacgccccagtttttctcacattttttgtatttctataaatatataatttttctgttaaaattatactttttcacatgttatatttgaggattaaattactttcattgttttaaaagcgcttttaaaaaaatgtttaaagaaaaactattctaaacccattcaatatcctttaattgaaaacaaaataatacatgcccgcatttattaaagtcaacatgtcaatgtgcctagatcatgaccaggtatcgtaacaaagtagtacattgtgtatacaacaattattacaccttcctttcctatcaagagttttaaatatttctaaagtgggaatatattcacgtattaggtttattaccgatatgaatatgttgaaactaggtgtggattaggtagcaaccatccaagcagaagtggaagcatttattatgttactttcttgctttcaagagaaacatacttaagtcaacaatatatgctgagcatctgaactttctaacctagcttgcctcatttttttattgaaagtgcctaggccagttatttcagaggttgaagaattaatgcaacttattttgtgtgtaacctttttacataattatttaatgttagtatgttacagacataattgtgtataaccttttgcaattacaacatttgtagggactatggatttattaaaatatttttctaccaccttgtctcaagtaacgggcatatgtcatgttagcacattagatgctctttaagaaataagtcaaccnnnnnnnnnnnnnnnnnnnnnnnnnnnnnnnnnnnnnnnnnnnnnnnnnnnnnnnnnnnnnnnnnnnnnnnnnnnnnnnnnnnnnnnnnnnnnnnnnnnnnnnnnnnnnnnnnnnnnnnnnnnnnnnnnnnnnnnnnnnnnnnnnnnnnnnnnnnnnnnnnnnnnnnnnnnnnnnnnnnnnnnnnnnnnnnnnnnnnnnnnnnnnnnnnnnnnnnnnnnnnnnnnnnnnnnnnnnnnnnnnnnnnnnnnnnnnnnnnnnnnnnnnnnnnnnnnnnnnnnnnnnnnnnnnnnnnnnnnnnnnnnnnnnnnnnnnnnnnnnnnnnnnnnnnnnnnnnnnnnnnnnnnnnnnnnnnnnnnnnnnnnnnnnnnnnnnnnnnnnnnnnnnnnnnnnnnnnnnnnnnnnnnnnnnnnnnnnnnnnnnnnnnnnnnnnnnnnnnnnnnnnnnnnnnnnnnnnnnnnnnnnnnnnnnnnnnnnnnnnnnnnnnnnnnnnnnnnnnnnnnnnnnnnnnnnnnnnnnnnnnnnnnnnnnnnnnnnnnnnnnnnnnnnnnnnnnnnnnnnnnnnnnnnnnnnnnnnnnnnnnnnnnnnnnnnnnnnnnnnnnnnnnnnnnnnnnnnnnnnnnnnnnnnnnnnnnnnnnnnnnnnnnnnnnnnnnnnnnnnnnnnnnnnnnnnnnnnnnnnnnnnnnnnnnnnnnnnnnnnnnnnnnnnnnnnnnnnnnnnnnnnnnnnnnnnnnnnnnnnnnnnnnnnnnnnnaaaaaaaaaaattatcacgatcttagtatttgtttgacacatggaattattagacatgaaattaaataagtgtttagactttaaaaagtcttgcaaaatttgaattgcaatattcaatacttaattttataaaattataatacaattgaatacaaggtgccttaatgataacaacaaaaaatttgagaagggataattcttctatagagtgggagtaagggtttcttagtatattagataactgccggacaggggaattatgatgttgttccatagttaaagaagcacactagagatgacttatcgcaactcgagaattttaacaagcatgattactatcactagccgcttccatcattattttactattactggtgtcatttttgtcatttttatttttctcataattaggtttggagtttgaattggatcggttttgaaacaaaaaatcatcttattcaatttctttgatttgatcatttgatcattcattcgatttgaaattttttttaaattcgatccaatccaatgcaatttttttcggtttggattggatcgattttcgatttttaaaaagtctaaaaataacatttatgagacttatttttattaaaataaggagtatctaacataaacaaacacattcannnnnnnnnnnnnnnnnnnnnnnnnnnnnnnnnnnnnnnnnnnnnnnnnnnnnnnnnnnnnnnnnnnnnnnnnnnnnnnnnnnnnnnnnnnnnnnnnnnnnnnnnnnnnnnnnnnnnnnnnnnnnnnnnnnnnnnnnnnnnnnnnnnnnnnnnnnnnnnnnnnnnnnnnnnnnnnnnnnnnnnnnnnnnnnnnnnnnnnnnnnnnnnnnnnnnnnnnnnnnnnnnnnnnnnnnnnnnnnnnnnnnnnnnnnnnnnnnnnnnnnnnnnnnnnnnnnnnnnnnnnnnnnnnnnnnnnnnnnnnnnnnnnnnnnnnnnnnnnnnnnnnnnnnnnnnnnnnnnnnnnnnnnnnnnnnnnnnnnnnnnnnnnnnnnnnnnnnnnnnnnnnnnnnnnnnnnnnnnnnnnnnnnnnnnnnnnnnnnnnnnnnnnnnnnnnnnnnnnnnnnnnnnnnnnnnnnnnnnnnnnnnnnnnnnnnnnnnnnnnnnnnnnnnnnnnnnnnnnnnnnnnnnnnnnnnnnnnnnnnnnnnnnnnnnnnnnnnnnnnnnnnnnnnnnnnnnnnnnnnnnnnnnnnnnnnnnnnnnnnnnnnnnnnnnnnnnnnnnnnnnnnnnnnnnnnnnnnnnnnnnnnnnnnnnnnnnnnnnnnnnnnnnnnnnnnnnnnnnnnnnnnnnnnnnnnnnnnnnnnnnnnnnnnnnnnnnnnnnnnnnnnnnnnnnnnnnnnnnnnnnnnnnnnnnnnnnnnnnnnnnnnnnnnnnnnnnnnnnnnnnnnnnnnnnnnnnnnnnnnnnnnnnnnnnnnnnnnnnnnnnnnnnnnnnnnnnnnnnnnnnnnnnnnnnnnnnnnnnnnnnnnnnnnnnnnnnnnnnnnnnnnnnnnnnnnnnnnnnnnnnnnnnnnnnnnnnnnnnnnnnnnnnnnnnnnnnnnnnnnnnnnnnnnnnnnnnnnnnnnnnnnnnnnnnnnnnnnnnnnnnnnnnnnnnnnnnnnnnnnnnnnnnnnnnnnnnnnnnnnnnnnnnnnnnnnnnnnnnnnnnnnnnnnnnnnnnnnnnnnnnnnnnnnnnnnnnnnnnnnnnnnnnnnnnnnnnnnnnnnnnnnnnnnnnnnnnnnnnnnnnnnnnnnnnnnnnnnnnnnnnnnnnnnnnnnnnnnnnnnnnnnnnnnnnnnnnnnnnnnnnnnnnnnnnnnnnnnnnnnnnnnnnnnnnnnnnnnnnnnnnnnnnnnnnnnnnnnnnnnnnnnnnnnnnnnnnnnnnnnnnnnnnnnnnnnnnnnnnnnnnnnnnnnnnnnnnnnnnnnnnnnnnnnnnnnnnnnnnnnnnnnnnnnnnnnnnnnnnnnnnnnnnnnnnnnnnnnnnnnnnnnnnnnnnnnnnnnnnnnnnnnnnnnnnnnnnnnnnnnnnnnnnnnnnnnnnnnnnnnnnnnnnnnnnnnnnnnnnnnnnnnnnnnnnnnnnnnnnnnnnnnnnnnnnnnnnnnnnnnnnnnnnnnnnnnnnnnnnnnnnnnnnnnnnnnnnnnnnnnnnnnnnnnnnnnnnnnnnnnnnnnnnnnnnnnnnnnnnnnnnnnnnnnnnnnnnnnnnnnnnnnnnnnnnnnnnnnnnnnnnnnnnnnnnnnnnnnnnnnnnnnnnnnnnnnnnnnnnnnnnnnnnnnnnnnnnnnnnnnnnnnnnnnnnnnnnnnnnnnnnnnnnnnnnnnnnnnnnnnnnnnnnnnnnnnnnnnnnnnnnnnnnnnnnnnnnnnnnnnnnnnnnnnnnnnnnnnnnnnnnnnnnnnnnnnnnnnnnnnnnnnnnnnnnnnnnnnnnnnnnnnnnnnnnnnnnnnnnnnnnnnnnnnnnnnnnnnnnnnnnnnnnnnnnnnnnnnnnnnnnnnnnnnnnnnnnnnnnnnnnnnnnnnnnnnnnnnnnnnnnnnnnnnnnnnnnnnnnnnnnnnnnnnnnnnnnnnnnnnnnnnnnnnnnnnnnnnnnnnnnnnnnnnnnnnnnnnnnnnnnnnnnnnnnnnnnnnnnnnnnnnnnnnnnnnnnnnnnnnnnnnnnnnnnnnnnnnnnnnnnnnnnnnnnnnnnnnnnnnnnnnnnnnnnnnnnnnnnnnnnnnnnnnnnnnnnnnnnnnnnnnnnnnnnnnnnnnnnnnnnnnnnnnnnnnnnnnnnnnnnnnnnnnnnnnnnnnnnnnnnnnnnnnnnnnnnnnnnnnnnnnnnnnnnnnnnnnnnnnnnnnnnnnnnnnnnnnnnnnnnnnnnnnnnnnnnnnnnnnnnnnnnnnnnntgtagttccactcgtcaaataataaatgtttgtaaatctatgattggccttccttatttttatttttattttatttttttttaattttctgaaagagaaatttcatatcatccacaattgagaacgaatatttccattactgagacataactttgtgttatttgccaatcggattcaatggctggaccttgtcaagccacataagtaccatagatatgctactctagtatttaatttggacaatcaatgatttctcaggaaggaattggcatcttcaatttatccatgtcgtcagagaaggaaatcagtgtataaatttgactatattaaaagaacacaccttaacaattatacttgcaaaacttgttaaaaataataataataatatattatacataaatgtaaacaactataaatgtatcatgtgggatcggatcatatttcaatctttacatatttagttcctaggcatcttttgctaaaggctaggtagctgtgtactccttgtatccgattgtatttctacgcacttagtctctatgcatctcatgtttgaggtatctcatgtttgaggttaagagactctatatcctcctagatcaatttgtgtccccattcacaatcctccttaaagggtcttagcccaacactatcttattatatcatatcatgcccaattcaatcacctctaagagtaattgcaccataaaatatcatggacacaattatgtacaaaaatcctctagatatcatgaacattctaatacatcataatttctcgatccataaatattggaaaaatatccgtcacacacaagcataaataatcatttctttgatctaagaagacaggttaagtaagacactttatttgagtattttggactaggtcttcttatactaagaatcctttgttgaaataataaatttattcattttttcaatttttttcttaattccataacgaataaaaactaatagagactttacgtacgtaacccatatagttctgaaatcatctatatcaaagaacaaacatatacggaacactttttgttaaaccgattttttaaacaactattattcgtaaattaagagtatatatgatttgaaagagtagctttattcctcacggaccccttgatcatgaaaatggtagcttaattgatattgatatatagcttaaaagttgtatatatgttttgtaaaaatattactcaatattaattagtttgtccaagatatatacttttggtcattgtcatgtacaccccaccttcacccgataaagtcaggcagtagtgtttataaaacaagttgaaacttgaaacaagtttaacacgatcgtatatactcaaaattttgatattttttttatatttaattttaaacttaaattgacataataagaaatgataatatatgagataaaattgagtcaacttaattcattaacataatatataaattttaacattatttattactaaatcataaattaaaaaaatatataactaaattaaagtataatgtatggtatatatttcaaaataaataatattaaaatatattatcattttattaactattttcagaaatcttattaataatacataattattttgaaaaacatgcatatacattttaaaagaatatgaaacactaaattggtttgagatatatattgtttttagataaattgaaattaatataatttaaacttgatttcagaatatgttataagtataatttctaaatcttaaatttgtaaaaattaacttaaagtcggacgaggttagttagtgaagtggaacatatatgcctatccaaataagtaaaataataatagttcttttgtttttattattgcattttgtaatcatgctagaataaccatgcatttttagacaactaacacatgtgatgggaacgatagaacacacaaataatcagtttatcttgtaagtacacactatccatcattgcttttcccaggtgctaatcgttgtactaatcacatgcacaactacttttgacttttcttgcccaacaagaatctttactaatttgctttttcatccgttaaatagagaactcaccaaatatattaagtcccacacgacaacacccatagagttatagctagctaggttaactttctgccatggcttattacagatttcttgatgtgttttcatggattcaaaaccttccaccaatcccagaatggaaaacagcttccatgtccctgagcatatgttccacaaactcatctcagccatcacttaatctcaccatagcaaaaaatcatcaccaatccccaagaatctctttagccattgtggcagacttcaatattcccatctccctttggacctctaaacctttcaaacccagcaccaaaaccatgaggttaacagatgatgaaaccctttccaatctccttgttaatttcatagaagagatccttcattatggctccaacaagcacagtattccctatatcaagttccccaaacttgattctgtttccaacttccaagacattttcaaccttgcttttctcaccctcttgttcctagtttgcatatatgaagccccttctgatcttcgttctggttgccttagcactttgaaagaacaattggcagggtgtcaatcaaggcaagcatcaaaatttctgatgaaactcttgggttccaacttggaagagcagtggatgcgttctgtgaaccttgcaatcacaaattggattgtggagatccaagaagcacatcacagtactgatcacaccaccttcagaacaccatctcctctattttcttatgcgttctcaacgtctgggttgtggaaagttcaattgtactgccctgtcataaacatggatgttgtcaatgcaaacaaccacccagctgatgagaggcttcaattctctctcaagtaccagcagcttgaaggtgttcttcaattcaattacaaagtcataattagagagaggtgggttgaaatcggggtgaacattgacaacataaggtaatcaaattcaaaaaaaaaaaatttattttttgttagttaacctcacaatttaataaattaatattatattttttctaatttaattttgtatcttagaagacacgaaaaattattatataatttgagactatcatgattttgaatttttgacaaatctctatatataccacaaagttaaggattgttaattctttcttataaactaattttgttagttatatgttgtataaagattagttggaattatgagcgtacatgttgattaatttgaatctatctaataattctttaatatcaccggtatctttatgtgtcaactttttttcgcatccttccaattgaaaaatgnnnnnnnnnnnnnnnnnnnnnnnnnnnnnnnnnnnnnnnnnnnnnnnnnnnnnnnnnnnnnnnnnnnnnnnnnnnnnnnnnnnnnnnnnnnnnnnnnnnnnnnnnnnnnnnnnnnnnnnnnnnnnnnnnnnnnnnnnnnnnnnnnnnnnnnnnnnnnnnnnnnnnnnnnnnnnnnnnnnnnnnnnnnnnnnnnnnnnnnnnnnnnnnnnnnnnnnnnnnnnnnnnnnnnnnnnnnnnnnnnnnnnnnnnnnnnnnnnnnnnnnnnnnnnnnnnnnnnnnnnnnnnnnnnnnnnnnnnnnnnnnnnnnnnnnnnnnnnnnnnnnnnnnnnnnnnnnnnnnnnnnnnnnnnnnnnnnnnnnnnnnnnnnnnnnnnnnnnnnnnnnnnnnnnnnnnnnnnnnnnnnnnnnnnnnnnnnnnnnnnnnnnnnnnnnnnnnnnnnnnnnnnnnnnnnnnnnnnnnnnnnnnnnnnnnnnnnnnnnnnnnnccaaaaaaaaaaaaaattaacaaatctgagaaaaataaaattttccaatcgcatgcatgacattttttctattgaaaagacagaaaaaggagataaaaaattgaaggtgatcatatctatgtatctcaagttcaacacaataaaatcaacaaattcgtgagaaaacgttattttccaatcacgtgtcattttttccgtaaaaagagacaagaaattagaagtgataatttctatttcaaaattgagagaaaaaataattttcaatcacgtgtcatctttctatattggagagagagaaaaaaaagagtgagataagaaatgaggattgatcgattgcatatactttttgaaatttgtacaatacccaactaaaaaatatatgacttgtcatcattttctttctctttatgcatgtgaggtgattttctttcttattctttatcatgttaaattaactaatatttacatttatgtggaaagatgcgatgttttcaaactggtagatgacattctgatgagagaacgaggagcaggtgcagcagaaaaacatttcccttcaagaatctcattgcaactcactcccacaattcaacaacaagtattaaccgtatccgttggcaaatcgtcagagaatccacgaatagagtttggcgtggagaaaggcatagaagcctcattcgagccaccaaatccttacataggacttagcgtatcagcaggagagtccacaactctgagcttaaagccctggaaattcgaacaatcagttcatggctacagtgcaaacttgaactggtttcttcacgatagcaccgatggcaaggaagtgttctccacaaagccttcaaaggttgcgttgtttaacccaaaatcatggttcaaagacaggtatccatacaccgtcactttaatgaaattactaataattaaatagcatgattttttaatgggattttcttgtcgtacaaactcttaatttttatgaaataaattattttttcattgactcaatgagagtcttggatccggcattaggtactcgagtgcttatcgtcctttcacgaggcaaggaggggttatctttgcgcgtgatgagtatggagaaagtgtgtgttggaaagtggacaaaggtgctgtggggaagacaatggagtgggaaataaggggttggatatggctaacgtattggcctaacaagcacaagacgttctaccatgaaaccaggaggttggagttcagggaaacggtctacctcaaaattgcatagcttaggactcacgcaaaggaatatatcaatcaactttgatttggactatagaaacgaatttattatatcacaaatacgcatttttttttcttcattttattgaacatgtggttaattataattgtaaagtaaatgataacggagtgaaattattggtctgttttcatttttcacaaacacgcgatcatttccatgggaatttaattttaatgactgattgtaaaaaatttgtgttatcgtattactactattcaagatgaaaagtcaatttatcctctttaattcagagtcatgtgtccattgcttcttacatgaatgtaatatatttaaagtttttgtgagtgtcgttgttggtgtggtcatttcatttttaatttatttaaatacattgatcattaattcgagcactattagggaaaaatatagaagaaagtatttttcctgactattcttatccaatttgaaaatttaaactgctatcaatgataataattaatgtgatcatgttagaattggaataagttgacttatctaggctatgggttcttttcttgtttcttttcttcccccctcccgaaattaatgatactatttatttggatgcttaaaattagaaatcaaaattataattctgtattagctgaagaagattattatagtaatttttttgagaggaagattattatagtaattgagaaatactgcttagagcttacatgttacaactttgcttttttgaagaagaaaaaaaaatgttattaattcttaatgaatgtgagataacacaagatgtgcctcgtgtcaatcgaagaatcccctatacaattaaaacatctgcatgtgcaatgcattgtgcatccccatcctaccaagcgcaaactaatatcctagctatgtccagccattcgtgacatgtaagtctaggtggaacaaaaaataaaagttaaatcatcttttatatcttttattttttttaaataattttgattatttatccttttgaaataattcaaactatcattccatcaatttaaaattaacactgttaattagtatttagatatttataatttttagtcgtcataaaatatatattatttttttcctcctcttgttcccctttgaaagtgtgactatcacgagcaaaaactcttctccttttacagataaaaacatatttaattctaaaaataaaaatgaaaataataaaaaatactcaaaataaaatagtattataattttaaaatatttttaaaaaaaagttcttgggagttccaagtctaatttaaacagatcactggttgattattataattgggcgcctgttagctggtgtaaaagtagaactagacatgatcacaggagaagaccaagacattgattttctgttgtacttctcacttcctcaaaatcatttatgtactcgtcttataattaaaaaaagaattatgcaaaaaaagttaaaaaattaaatatattatttatttaaggaatcaaattttaaataaataaaagtattttaataattatatttatcaagaatgaaaaaatgtacatactcattcattttcatctccgttctaaaaagtccaatattacttatattcatgctcgtgtcacacgtagtcaatgttatgaaaataggttcgaaccgacagattggaatgggaaccgtgacatcactcgggccggattggttaatgaactggccatacatgtgactcggttttgtctggagaaaattggacgaatttttgaagacccgacaacctgaacgatttttaggacccaaaccgggttagtgccggaaataaaaaggctccaaacggcaaaatggcatcgttttggtgagccctagggtaatttttgagttttcctaaatgaaataagctcttcacttcttctgttcttcatcttcattcgttcacgctcaccgctcaggcgcttacgctcactgcagcagggttgttgcttcacgccatctccgtcgccggcgcagtcacagtttgacgccatcgccatcgcgcgttacaccgtgatcgtactctcctcggtcacgcacacaaggtttcaccgtgcttgtctttgcttttctattctcttttccaaataatttgaattgataatttttattctcttcaccgtgagaaaatgaggggcgcaacaagcaagtaggcacacacacgtaagttaaaatgaggcgtagtaagcacgtaggcgcaacggcaacattgaatttgaaggggaagagatgtttttatatatatagggattatgatttttcttatttgggccggatttgcttcttgcactccctttattgcttattgtactccttctgactcattttttattaaaatctgtatttgtgttttaatttaattagttgttatttacacttttttattaatacattttatttgttttatcaactttaatacttatatataatataattttaaattttttaatatttatagaatcaaattaaatcaattactaatctaccagttgaaccgttgacccaccgatctaatacttctgactaggttaataaacatgtcggttttatagcactggttgcaattattactgctcactgccttgagtcaaagcaatattataaatatttaacttactatggcaggcacttttaatgattggcaagtttacatttattgcgctgctactctaatgtttgggaacatgcataggcttagctgtgattaattccttactgtatttgctgttcactatttacagaagctgttggttacagagaccctcttattgctgtcttaccgtcattcagaatagcaattagcaagtgacctagcccatcttattgttgatgattagttatgcagcattaatttgttagggagctgagatgcaaattaaatttatagtcaagttattctttctattctatagcaaaataacttgtagttataccagcgaaagtttttagcgatctattcagaaataattatttgtgcttatatattgggcaaaggggtccttttcttgaagatcacatttggtatacagtttactacttgcataaaggcaatttcaaaagtacaaatttgtgttgttaaaacaatggcgatatttaaataaaaactgaaacaatatgctgattattctcactttactttttgctagcatttatggaaaaggaaattatgttgctttcgcaaaaatgtagactgcggaccgaatgatattggagtgtatactagagctaatatacacacccacaccagacctatcatgcatccaattcatcatgtcctgtctttagtttttactggtaatttaagattgaatttggtttgagtgtttttttttaaataatttttatttctaaacttttaagatttaaaaaatgtatcgaaaaaaattactctaaggtgtcattacatttttacattttcagaaaattgagaatattgatttattgttttttagatttgggcctgttttcgaaaatatttttagagaaaatattttcaaaattttaaataaaaatatgtttgctcttattttctattttttttaaatgaaagcataaaacactcaaaccctacctaaatagatataattacttgtgggatcaatccttcactttctgccaagaaatatccatgttcatccaaaccaaaaactgaattcatcgtgactaacactccgaattcataaatgcagtgaaaagatttgtgaaaaataatgataattttatttcgatttaatgcttttccaagggaagctgccttcatatccaagagaaggaaacaaatgaacttaaaaggcagagagagaactggccttgcctctcgagaaattattggagagaaaatatctagggacacgacattatcttatttccccgagcttaaacggatcttaaagatccttttaacatgctccatagcctatccaggccttcatctttcgtttttactcaacagcaaaacttaaagcactaaattaatacgcttttttcttgccatatcatatcataatgttgttggtttggatagtatggaacttgaattcctcaagtaaggtagtgaaaaggttctctgacgaagattagttatcgacaaagctaatggatacttcgctttaatgtcatagtgacaattttttgttatatatatatatatatatatatatatatattatgttaataatgtctaacctattgaacaagctgtaaactatttgaagcatctaacagcagatttactgttgtagaggaggaggagacattacatagttatagagattcatggaaatcaatcttctcaattagattttcacatgattttattatgtgaaaaatttgtgtctgtacttagaggattaaaatataatgaaacttgggaagaatgttgccactgttggtaagtcatttgagattatacattaataaaaaaaccattgtcaacaagaggattatacatcaacagtcagtcttttctagacccagctcctcactcttcctttgaaccagcatttctttgactttgtgcaaggcattttcaagattctccaactgcatatttggcacaattcaattagtctatctacatttacttgttttactttccaatattttcaaatttaatagagtgaatgcctatattttcctagtacaagtagacagtaatggatactatattttgggaaatagccatctggatggcagttccatacctcttgaacagaaaacctattatgtaagaataatccactgtacaagtcaaaactgtctctgatggtggtgtccttctgcaacaagttgtaaagaaccacattgataccatgcctagttgcaaaccaaaatatgaaaggaaaggttttggagggggaacggggaaagtttgaaaacaaaatgattggagatatataccaattgaataagtgtatgaaagccttttgtatcaataggtgtggacttgatatccatttctgccaatgtcctgattaaaaaaaaaaggccaaagttgtacctagtgagcatgcatatcagtatatgtgtttgtacatggttgatggaaagtccacaagttataaagtgcagaaggtagcatatatacctgcctatagtgtgtgtaataaattgactcttggcagctattttatcatgttcctcacaagacatttgtagcatcctgcagccctgttaagaaaagcagggtgaaatggataataaatcaccttggataaatgtgaggtagtctcaataaattctttcatgcttttttggaatccaagcagtagtattccaagaggcagttaagaacttgctgtgggcgagagttctaagattgatttgtaaaaatatcttggcgaagcctctatatacatccatgcctatgctacttgtgcgatgttcctattaatttttctgagttgtgattttttttttctgcactaaaagattttagaatataactaatcttaaggtgatattgtccaaagctaattcaaagctttaacttgatgttttattagttcattcttcattggccgcactatttatttgcaaggttttgttattgatggcaattgactaaggcaattaacgtacctcacttgcaaaaatgtggaggaagttagagcagatagcttcatctcggattcgaactttatcatatacgaatgttagatctttccacccatccttcccactatctggtccaaacattgggtgtgtgcacagtatgtctgactcctctggcaatacctgttatgaaagatgaaagcaatttccttgaaacatgaattgaaaattacaatggagaattctatgtgatgccttattctgtgtaaaactggtttgacaaatttgttacattttaatgataactagctgcccatgattataaaacaccaaatttgtccattcattattgattttggtctgcttggagaagagaaacatagcttattcatacaatatttcagttattatagagtttgacaaaaatccagttattatagtttgtaatgggtaaagctatcgcaatttgaagggaggagaaacatagcttgtttattcaaatattcatcccaagcaaatccttccatcacggattattaagaaatagaccttccctaatatcgcctaaaagacaagtccaacaaaacttgaatcacccttagattatttcccctcccatataatttcaccaccaattcatttttataaaaattaaataccatgaatactagtattctcacacatttcttccttcatacaataattcattctcaccaaggctatcaaacaaaactagagggatcatcaaaatgaagctattaaaaaattgaagtaccttaagtagaagatttcttgggtgctctttaactgaaaggacatcaacaaagagtgttggtcttctgagacaagtgagtggcatagagctgagaacctcggagagagataggatggacgtacatatgagtatgacatcgttgtcagcctcaaggaatgcagcaacatccctgcagggacacatgacattatgcaacatgaagattgccacttattatgtacatatattcaagcaattcaatgatgatttatgtatgtacctgaagaattggatacccattgggaggcataagaaggagtagtcagtacgcgaagttgcccttagagtgtggccttgtttgatcatagtctttgccagaaattgcccgaaggaaccaaacccaactatgccaattttcagagaccatgttgacatgattgggttctaatgttctatggttgctgttgttttagtatatggtctattctgaaaaaagcatcagatcggatcgaggtctaacttttatacttaggtccaactttaattccatcaaaatctccttgcatttattcggacaagattgttttaagataatattgtaaattaaacatttaaaaaaaagaaattcataatattgtaaattaaacatttaaaaaaaaaattcataactactgaaaatttaagataatgctagatataagatgaaatctttacgaatgctcagaaaaatatctatatgatttagtatttgatatgataccgtctggtagtacattcattttaaaaaagaagttgaaataattttattgaataatattttggttttaattccagaaaccgttagtcaccacgagacaagaaaatgcatgaaataaacgagcaataatatttcagaatcaccacagtcgtaccattaacccccaccaaaaaaaaaagattcataaatttatctcatttatatgattttagagataattgctttcatttaaatgaaaacttagactctctttttttataatattttctcatgtttttagtatttttctgccaagaggaaagttaaaaacatattaaaaatttagtgaagaaaataggtctaagaaaaaggaggcccttatattttggaattcttccattttaaggctatgtcttgaagcaaggcgtgtcatgtgtgtaaactctagattgcaaagtaagatggaagtatatttttgtacaacttggactataccagttaggtgaattagccattcctattctagactcatcagtcattacctcgggccaaaactgcaaaaaatcttaaaattatgaaaataataataattcttattgcttcggaaaagttatcaatgtgaaaatttatcagcatataattataggaacctagaatatagaacctaaaatttttcttgtaaaaatagaggaggcaaaacactaaaaacaaaactttatatttttaattttatcaacatcatgaggtgtacaccctaagtatatatcaaagttccccgcaaatcagaaaaaaataaaataaaaaactaaaagttccccaggacctccactccactatacaagcatgtatagtatttatatttatattgattacttctaggtctgattctttgaattttaaaataatttataacaattaaaattaatgaagtgcattgaatctgcattggaagatttccttttgtttgatttatgctaaatgagtatatttaaaaataatattgttttctaataaatatcatctttccaaatgttatttttaaataaattaaaaaaaacgattgttaatcaatgtgtttaaaaaattattttgaataacatgacactgtttattatgaaattaacaacacaacaaacaaaatataaccttttttataaattaaattactcccttaaaaaaagttttttacaacttctaccaaacgcatgcacgttcaatttcattttcttcaaataaccgtacactttaaagaaatcaatacacctaaataattaaggatttgacttcttaaagagatttgtttttgaaagaattctaataagaactataattattaattaaaaagtttaacaattaatattataattaaaaataactatatagttatttaaaaagcaaccgtaaataaagtaaatccctctccggcctaaatcgtataattaattattatgccttggtggtggttataagtttttggcttttaattttttaatgtatttttcaaaataaaatacattcagtaaaaatgaaattagattgattttaaactcaattttaaaataatttatatttattatcaaaatataaaaaaaaagttttgtgaatttgatcatgttaccttaccaccatcaccatgttcataatctttaaaattggtgattgaatcaatcaagaccttggatcactaggtgaatgatccaattggtaaatcattaattgattcacatgacttgttttttattaaaaaattatactcaactttaattgacttgcataatcagcatatttcctcccttggacacgactcaccttaaattagtgggtcatcaaattaatcacaaatttgatcaggttgtatcagttcaatgcatgattgattcgataaacaacttgatccgatcgaatctctagactgtaatcaaactgatctgatcatgggattgatctaaatgttaaaacataattattattattttatcgttattattatcatcatctgtcattattttataatataacaagataagatcgtaaaataattaactcatttatttatttttaatttgtaatatttaaaaaaattaaaaacaaaaaataaacaaaaacttaaaagtaaaactgatcttaattttttttttttttaaaaaaggaaaaatcaccccgaaacggatctctctctgtctctctctctctctctctatatatatattatagtagtttaggacagggtcaccgaccagcagatgatgagaacgagacaaaaaaatgacgtgtaaccttgtcaacaatgaagtgatggaattgtggtaaagtctagccttctcggcccatacccaatagctgaatctgaaataaccgtgtccagggttatggttatctatctatctataccacacgcatgtcacgtgcgtaatgtagttgaaataatcgacccaacccaagtcttctatagttctatgtcctcttataaatacccacccaacacggagtggataagcactaacattattcctcatccttatcctctttgcttcaatggaactcatttccgcttccagtttgaatcccaacgctccgatcttcgtgccgctcccctatcgaacggtggaggatttctccgaccaatggtgggacctcgttcactcctccccctggttccgcgactactggctccgcgagtgcttccaagatccccagtaccaatacgacgacgttttcgacttcgactttgacctagatctccgtaactaacttacttatctccattttacttctctcatattcatatacttttctttttaatttattttattcggatggatgcagaagatgaagaagaaaatgaagggaaggaagggaaagaggtggtgtcgctgggggtcctcaaatggcgaagctgtggaggaggatgggccgaagcgccgaggtatgtggaaaaggtccctaagtttgtgaagcccaaggtgagcccacgggctattcaccagcccaggtagacgccacccggcccattcccccgccaccaccagctatgtacataaaaagaaaaagtgtcaagcgccatgacttcgtcatcagagctttctttacattttctagattttaattttcgtgttgatcttcttgttacttgatgatgttccataaagttaaactcaagtttctttgataatgacgattgctcagcttgtgtccgtgttacagatcttaatatctgcgaggctataagttctaaattttattttgccaaattttaatatcgagataacgaagtcgtagtatgatttatgggcgtggcaaaataattcgattattttcaacgcttcaaaaattttattttccttaatgagatgagtttactttttacacgttacaataaaacgaaaggaacttactatcagcctattccttgggttaaaaacagacgaaaggatcggacaaatgagttggctacagatctttttacatttcccattatatttttctatacctctttaagaaaacacaattagaaaatgatttttttatatttttcaattttcttgtgtaatttatcttaatttaatatatatatatatatatattaattttaaattatgatagaatctaaatttcttttatttcttcttaggaatagtcttggaaaagtttatatacaaggaagcaatggaactactagaaatgcggctttaagataaataaataatatatatatacatatatatatatatatatatatatatgtatgtatgtannnnnnnnnnnnnnnnnnnnnnnnnnnnnnnnnnnnnnnnnnnnnnnnnnnnnnnnnnnnnnnnnnnnnnnnnnnnnnnnnnnnnnnnnnnnnnnnnnnnnnnnnnatttatttataacatttttataaaacaaaattgtactatataatttttcaatcgttttcaatgcctaatttactagagaccaaaacaaaatgcccattgtgttcacaattaattgtaggtaaagaggcaaatcagacacaacacgaattctttcccataggtggcctaagtccagaagacaaaaatatcaaaaacatcaaacacaatcctataagatcaagttgttagtcaattgacacaaaaatttccttgacgaaagtcagatagaaactaatattttactagttcttatttataccggtgtgtttggaatctgttacagctcagtcaaacggagattttttcactttatcatgagcaaactgcaaactgagaaggagggtgaatctacgttcaattcgactgaatggaaatacaaatacacttgtgcatttccgatttgctgttaaaattactaagatacgtgttctaatataatctaacatgtaaaaataaaatgaaagtaagaataaggatcctaatccttttgtaaaagtacttttgccttaaacatatttttacacgtgattattattattaaccctggacagtgaaaccttcctcaagtcataacatcttatgcttacatcaaacacttctgttattttcttttctttttcttctttgtccaacaagaaatatgacaatttgtttcgttcctcttcaaaataagctctgtttttcaattgccatgccaccaaactgacgtttgactagaagtaatagtttcttacttctcattgaactaaactttgaaaggtgtgattttccaaacgaactatacacaaattaagatgtgtttggtttaacgtttagttgaacatacatatatttttatataagttttgtaagaattagaaattcatagttttttattcaacggccatttggagatttttcgacagtaaaccaaacacacattaaatatacactacaaacaaataccttccttagagcttattttcttgaccatcaaaatattaaattaattttcagttaaccctcccaattttgtattagagtgaagttatttcataaaatagataaatgtttaaaagtggagttgtcattacatctcatcaaatgtacactaaagcttctcagtgcaatctagtgtattctttaatacgctgcagattttcatctatactccttcatttcttggttttcattctattaatactagaacatcaacagtatagatgcataagaggtatatcatatgagacatatacaacaacaacaacaacaatcactatgttgctccgtatatcatatgagacaaatacaacaacaacacctccttcatttcttggttttcattctagttatgatttggataagtactactacaaatcacaaatatccaatttatgttgctccgtttgtcacgataaacagtgttaaacaaatagactgtatacaaataaataggatttcttatttcctttcatgcctcttatcagatgctttatttggagataaaggtcgaaaattacaaaaattggaatagatatataatataaacctcaacaaactctatatagatgatatgattttacttcgtgcgtgataccatatataactccttaattatatgtttcttgaggaaaaagaaaactttaaagctatgttttataagtggtaactggaattgtgaattcagcaattgggttggggttgaggattttcccagggggtagcattcttgccaatcttttgaataactctaatcacttcttccgttgtgacattgcctgtaacgatcactttgttcaactgcttgtccacgttatacgtctcaatatctgcaaggtcgcgggtcgaaaattattcatggaaccgaaagaagttatgcttgcaaagcaaattacactttgtagcaaagagatcatcataacaaaagttgtgagatttggaaattaattagttaccttcaatcttcttgatagccttaagaattttcttgatacactcgtcacagtgtaaaccaaccttgacttccaccacctgatgatacacaacaagaaactttgatcagttttctgtcccatatatagctgaaaacaaagggatcaaataatagctagtaagtttctgacatttgccattctaattgtctgagtggaaaattgatgcaaagttaatgtctctgatgttagaagccttgagcaagtagaagaaagaaaaagggtagggtgatttttactgttttaggcacagtgtgacatacagccatacttatatgaaatagcaattagtgaagacagaatcggattctgtacttgaaagatggaatccctcactttctgtcaataaaaggtgcaagaaagtttattcttaacagttgacatgggagtaactggcctccactcattcggtaaggttggcaaccacaaagtccctgttgggtttggccaaaaaactagtgaacaaagaagaagaggaatgaaacaagcaactaatataattcctccagctttcattagatttgtgacatttgtctactaggataacaaaaaaaaatgctaaatatataaattcaccattgttggaaggttccatattgtctgtctcaatttttaaggtgtaaacttatttatatatttgttggacaatttcatttaatgttaattagttttaagataaaatctaatcactataatggataattcaattataacatatattatttcatatgtatatatcaagaactgaacttataatcacatatttaaaggttaaaattatttatcaatcatatcaatcatgtgattcatatattttatgacgatattgttagaaccttaacttgtgcatcacatttgacaagtatcatgctacagttttatttatttatttctgtaaaagtgaattggattttgaagactcggtgtggtttggtttcacttctataatcatcaaacgtgtattttgatatgcacaaaggtgagtttaatatgaatgtgaatagtaacagcaaatgggcctatctaaaacatgtttggtggtattatcaaagttcctaggtctatgatattcttggattctttggtgagtacgatcaggtggatgctccttttcatgaattttgggttatgctgattgatgttcatgccttgaatagacattcctcataaattaatcatacacttgaagctcttgatcacagaccagaaaagcttttctaagagagtcgtccatttgttcaagggaggattcaattcattagatttctataatgttacttttttgcaacttgcgttaccttaattacctaagagagtcgtccatttttatgaatttgaggtagtaatataaaaaactgcctattttccaaatatgaaaaatatattaaagtctaatttttattatactaatagaatccaaaagtaatccaaaaataatcatttaatgaaactgtgataattcataaaaaaaaaagtattaaaattagtacatcaaattaaaatgcaccaagggtgtagcatggttgaacagtgtgcataaaccctctaatatcatctttggtttctacatataaaataaataaattaaaattcaatagattaacaattcaaaatatattttttaaaagtatcttttaaaataataaatataaacatttaatatcttgtaaggctaattaagatccattacacattgtatttgtaacttaatttgaataaataatataaaattctgattactttacgtgtatctaaattaaactcttcaaacttcgcacatgccttggtacatcctggaaattttaaagatagtatcacattagttttaaccacgccatcaatggcccctaaaccaagccataatttcttttttatactcaaaaagcgtttccaacatttcacgttaaaccgttgacgaagacctgccacagtttctctccaacagcatcatcataacaattcgaaaaaaataagaattcaacacaacagccaatcacaattcgacacctgttctttttttctttttacatttccctctgtaagtgtaacccgatcccaataaaaataccagattcgttgccacacacccctagattttctccctcttaatctcgtccaatttctctcatcaaagtttcgacctttgataaaattcaatcatggggaacgccctgagattcctctacagccattgctgcaagcccacagcagctggtgattctgaatcacttgggccacacggtgtttcctctgccaccgttggtgtttcagcacttgcccatgatctctttcgctttgacatcacctcccaggtacatgcatacacaacacatgtgaatcctccaatttggaacttacactttgggtaattctgttttttcaaccaatttggcatattggttttgtcaggtctttatgttttcccttttaaaatgtttttaggtcccggaaggactcagcaagcatgttgtgtcttctaagaaggctcaggctaattggtatactcaccacattcttctcactatgaccctgattggataaacttaataaacacttgggagaagaaaatatgaaagtaaaatgaattaaacaacttttataattaagttaaaattagcttatgtataaggtgattatacatgttctctcatttaacttctctgcttgccgatttaacttactagagaaacttaattcactttattttcttattttcttctcctgagagtacttattgagaagattatccaaacgggacttaaattgaatactataaaaccttcagaagcctttacctttgaactatgtatgccctttctgttccttacaatgtttttgaaggtatagaaagttagttgatgcttggaaagaagcaaaaccccctcctacgacacctgaagaagctgctagacttgtcattcagaccttgaaaaggcatcaaaaagcagatgttgaggtttgcatgtacttccattccaaactatgaatttgagtatgttacctaagtcacctaatcacaaaaacaaagctcattggggatggaatttgtgttgcttaatttatagggattgttggctttctatggtcttcctctaccacacaccctcgttcaaggaacttcccaacccccttcatccttgcctgatggagttcaatttgaaatgcataccttgccggtaagaatttaacatttccattcaatccataaaaataaaaagtatacttgagctgaaaatgtggtagttgacaacatgatattttcaatgggactaggttgatgcaaaggcaatagcagatggtgacactgtaacagtctatgttagcacaacagacccaagagaatcagcatttgtccctggcaatgtgcatgccgccaccgtgcgaagatcagaagcgcgtgcacgaaggaactttacagaagccgatgcattgcacaaacagatcattgattcaggatatcggttggtttgtagtttcccaattccttatgtctatgcttctaacactccatatttttcttctaattgtttgcttatttagggtgattcctgttcaaaacgaggaaatcctagctaagaagtataggattcgattaaggtaatgtctaaacaagcactagtgttaagagtgttgaagttgttgtggaagctattaatgaactctagaaacaaaacaggggaattgatgcaccagaaagtgcaatgccatatggaaaggaagctaaaactgaactgaccaagattgttcaaggcaagcctttgagggtccttgtttatggagaagatcgctatggtcgttctgtaggtgatatctattgtaatggcatttttatacaggtattcatttcatgtatacattttgtcattttgctctttatctatatacattaatacatgtttgatgtttctactttgtaagtttctcattttgcttttcttttttgattaggaaatgatgttaaagaagggtttagcatggcactacacagcctatgacaaacgaccagaactggaaacagtaagtaacccatgttctggttctttcattatttttcaaaggtatatatacatcctaactttcttaagttcttatgttagtgggaaaaacaagccagagcaaagcgtgttggattatgggcttcaaaaaatcctgagaagccatgggaatggagaaaggccagacgagaagctgcataacagcgcctaaaatcacacaagcagaattaccagagtgccaaaagaaattgagtttctcagtaaattctagggaaaaactcaaacaaaaggcccttcattcattatgtataattgatttaacaaattgtatgtatacaaaacaactgccaactaactagatctatttttcaatggtatgcttggatcattagcaaatctgattttaggcaccccaaacaattttttaccaatacgcttgcacagttagtttttttttnnnnnnnnnnnnnnnnnnnnnnnnnnnnnnnnnnnnnnnnnnnnnnnnnnnnnnnnnnnnnnnnnnnnnnnnnnnnnnnnnnnnnnnnnnnnnnnnnnnnnnnnnnnnnnnnnnnnnnnnnnnnnnnnnnnnnnnnnnnnnnnnnnnnnnnnnnnnnnnnnnnnnnnnnnnnnnnnnnnnnnnnnnnnnnnnnnnnnnnnnnnnnnnnnnnnnnnnnnnnnnnnnnnnnaataggtaaagaggcatgaagtgcctctctccattagtcgttataatgttgatttagtttttttacacaaaatagttgaaaaaatgagactgtttcgcatatcagtttcatttctagataacgtagagattaaaatcaatcattaaattagaatattacttcttcaaaattgttgtgtttaataagagtattgggtaacaaacagccatttacaaaattttctcttcagctagtgcagcattttctcttaacgtgagataaggagaaaaatgaaaattaagggcacagctcaattacatacattcaatatgttcaatccaaagctgtggcttaattagttggtctctctatctgatcttaccttaaaactttataagatcatatatgaatcataatgatctgttgttttttttaatatttgttttgctaattttttaaaatatttagttataatggatttgtgaatatcatgttatgtgtgcatgacatctaaagtgccaaaaaagaattgaaaaaaaaaaaaaacctaaaaccaatatattatcttatttcatttgatgcctttctgttagatgcttttattcggagataaaggttaagaataaaattgaaatagagatatacttatacctctgcaaactcgacataatagaatttcactttgtgcgtgatatataaatctttaatttgtatgtttcccggggccaagaaaacttgaaggctatgactgtgtttggaaacattttttttttaatccataaatgttgtattttgagtttttatatttttaattttaatcaaataattgactagattcaatatttgtctattaatgatgcaaaatttttaaaattcaacataaataaagataattaagttgaacacattaaagagatagaacacaaacgcttgaggtggtaattgtcggttgatgcaattttcgtgacgtgttgggtgttcgatctattgaaactactcttgatgtaattttagagatttttttatcatttaaagttatttcaattattaccttcattcgttaacctaccataatcatgatctctcatgtgaaagagcctaaattacctaattctttcctaatcccttaagagctacatcaaataatttgctttaagaataaatatgtataattaaagctaaataataccattttatccctaaacatgaattacttagatacacttttcaagttcttaggatgcaaacatttctcaataagtaaaccctataacatacatctgcatgagtgatcaaaccataaacaagacaataaactcataaaagaaggaataatattaaaaaaacattaaatggatagtgagaatcattacatcaaaagtgtttgtttgataagcttccaacaatggatgatttagcctctcattgtcatgagagacttacaaatacaaaaaggaaacaagaggaatggaagaaaatggaagaaaatggaggaaagggtcttcaagtgagtgagtttcatcccttctctctagccctagccctagccctgtgttctatctgaaatccccttttggcatagtgttttccctctttttatcttcaaaacgctacacaataatgttgttttgacaatgaccgtgtgctaagcatgcatgtacgcattgagcgtacatgcaaagtccaactaacttaagtgaccacgtgctaagcagtcagatgcgtgcagcgtgatgctccagttcttcaacatcttccagacctcatgctatatcactttttacaaaaaatagaatcaaaatattgtaaattttctaactttagcatccactgaataaaaattcaaaaaaaattaaattcctaaccttttaactcaaaaaaaacattaacagattaaaaaattaaataatctctatgtgaattaaatatacaaattacatatgcataacaattatcaaattgtttgttaaatctataagtctaaaatataatttatatatactatatttaaaatatttgtttattataaattttagttataatagaatttatatattttaaagtatttatttgttgtgaattacatttaaaattataatatataaatataaatctttatagaggtgctatacataagctaaaatactagatatctttaaaaaaattatgattatgctattatattcaaatttaaatcaaattaaatatttttataataagttgatttattaaaagataaaataatgtgattttaatttacataattaaataagtgtatataaataatatttatccatacatttgctggagttaaaatgcaaagtaaagaaattatatttcagtttaaaaccaaacaagtgtgataataaaattaaatcggacagttgtgtcctaaaagccctacccaatccaatacacaaacataaataatatttttaacaaaagatgctgattgctgagattgataatagttccttgataaacaaacataaattaaatctattgttaaaaaaagaatatctgaaaaatattcactagattattttataataaattttttaatctataacaaactgagaatataacagcaaaattacaccaacacaaacggtgcgccttgtattgagcgacgaaatctgtacagcatcatttcatcaaggcttcggtcaaggctttgagatgagcagggaaactccacggcagtgaacgggccattatcaaatacaagttggaaaaccaagattggttatatatacacaattatttattttattctcacaagaagtaacacaagttaagatttaagaatgtacaatgctctctacaaccatttcctctgtcgtttaaatcaattcacattggtggaaaattgtaaagaaaacctcaaacaagaaagaaaggactttggtttcacacagacatttacccaattagttacacaatgtgactcataatgaacatctaaaatgtacttcctaacataaaaatctgggttgattatgagagagctaagaggataaaaacatgaattaggataactaaaaatttaatggaccatcccatataacgtcatgtttatggaagcagaaacatccctggcttttaccttcagggactaaggagattctctttgtattgatggaggagttggtgggttcattgtttcatcattgccggtttcagatagctcttcttttacagtagatagtggcctctcagggctataatatcccttaacgaaaccgcttgaatttagaggactagatggcttgatcatagaaggggaagagttgttacccaaaggagaacttgtgccagatttgcttgacgtcacatcttcacgaggcaaaggtgacattagttgttggtcactagaataaacttctttcctgcataatttatcttctataatatcatagctattccccgttcgcacttcttgagcaagagagcaccagcaacagcataaccaaagtgtgcaatcagaagctgaaggcttgccgaaacagaagttataagaaggcaaactgaacctttttctcatttgaatcctccaaaaaccaccatacagaaaaccaaaaagacacagaatgatcccagtagctactagagcctgcctaacagtttcatcctcaatattcacagcagccaagataaaaatccaaaagggagccatgcaaaacagcataaaagtagcaatgtgaacatacatgtttccaaagccaagtctctccatgttccaaccaaagacacaaaaagtacagaaaagtgataggtatgcttgagaaatatcattccatatgtcaagtattcctccactccactgtggtctagtttcgataaccctttgttgctgtctggatgcaaatgaatatttcttctgaaatgatttcactctcagcggctcttgcttctgagcaacagaaccttgaacctgtgcttcttcatccatctcagaatcataatctttacctagagggctgagaatggaatacagaccagcgactgcaggtgcaccaattgcaacagatatgcatattccaactccaatggccgggcggtccgatcttttataccctaagtttagaccacaaagtgcatattgagcaaaacagttcacattaaggagaatgatcactaccatcatgtgtgcccattcatggggcttataagtcccattcttgcagtaaacctttctaagtcttgagatatcttgtggactccgcctgcacagtagcacaaggtggtagatcctctttggatgctggtacaaacacatgagtgtaaacagtgcattgagtatttgattgttcacttcaaaccatgcgtttctctgcgacttccttggcagcacagcattcaacatgccagtcatgacaaggaacagaattgcacctgaaatggcaacacacaaaatccacacaaagagggctatgttcattgggtccctaaaccattctacacacatcttcttgagtgaaacccagtcaagtttcttcgcaaacatgccactgaagcgctctcttaacccaatagaacccggagaaggcacgccttgagaaatctgttccttctcagtagcaggcctcctgaatttggcagatgcagaaccaaatttcaagaagttgatcctattgggaatagaactcaaagtgccctggaactttctctgaggattttcattgccaaccaatgctcttcgagaagttgaaatatctatggaagcaaactccgtctctttacttccgttagattcctcaatttcatctttaccactatcaacggaaaccattctgatatgaagcctgagccttctcaatcaaaaccagtaccttataatcaatgttaagaacaaaatcagagtggataagaacagaacatttatgctaaattttcaaatccatatcaaatttcatgtgaatccataagcacaaagaaaaaaaagatcagactttatgttaatatatatgtgtcgacgacccagtacacagatcattatacactttaattaattaaaattcacaaactataaaaaaaaaatataattctaattataccaacaaattcatctcaaggaaaggagtaaaaaaaaggaacaaaaacatcaaactttgaaggtatgaggagttaagtgcaagtagaaaggtgtcctgtaaggtgagaaaagaggaagaaagcgttgaatccaaggaagagttatattctctgcaaaaatcacaaaacaactaacgaatctaaactctggaaagttcaaactgtacaacgtgaaacaaagtagtacagttagatgtggcaatgaaggaacggtttctcagaacatgatccaacaatttgcttaatgcgacttccgagaaaagtaaaagggaaggacaagttgaaaattttatttgaggggtggaaattggaaaatatatttaattatttatttcttcttccgacaaccatgacaacagttatactgtgtggtagttgtgtcaaaaagaggaaaataaataaggatatagtatttttggttttcattatttagatgagtgaaaatacagacgaaaagaaaatttggagatgggacgcagagtttaaataaaacaagaacaaaatcacccaacatgcgtgaattgagaggggaggtggctgaattattcattagtgtttaaaaattaaacaattttctagtgatttcttttatgaacaataattttctattcattcaaacagcaaatttttactttatttctatctatattattcctattatatctttctctcttaatttactcgtttcaaaattcaaacacagcgtgaagaaaacaaaagaaaaatgaatttatctagaaagttgtcattgtagaaggcagagacgggtcccactggccactaacatgcccaaatatgaaatatcctctgcatttccctttcgttttgcctcactcgttttttttttcaatctttctctataaggataaaacttagatgatttttaattttctataaatgttttaagtgatggaattcattaatatcaaccaagtggtgagattggaataaatataagagaatatatataaaaaaatgttttgagtgtggctctcaaattataattagagttttcgaataatttatatataccttttaataaaatatttattacataattttttttatggaaaacttaagatatttaattcataatcaaagatcgaatacaaaaaaggagcataatcaaagacttgttagggcttcacaattttttgcttgtattacataagttattgatgaaatgaaattttaattaattaaagaatagtctatataaaaatatctataaaattgtattcaagttttttgttttatttataattcatgattacgtgatcgttacttttcatgccccttttcataatatatatgattgattttgcgggaatttttttcttaatagtatattttaaaactcatcaaatttaagactacttactcaagagactcattaaataatatattcttgttttctttatatatatcttcgtttatgtcggctaagttgagttgagcttccatgaggtgcacataacagatcatgtatgatgcaacgactcgctggttctatatagttggcctatttaaaattaaaataatattgattaagatgacatcactttgaagagctatgtgatattgattatgttggtgcctttatctgattagctgcttcataatattattgttaaattactattataacaaatatctagctatagtttaagtatcacactgttatttcaatttggaggagcttgataagagaaccaacttgatgtggccattgcccaatgcccatatagaatgccattggtatttattggatgataaatcaaatgtatatgacatacaattatatttgtaaaagagagtcaataggatctaactcatttgattaagtagattgtgcgagttattgtagtttttctatattatttttaattcttacaaataaacaaaatatttgtacaagagaggtgagcacttaagagctaagtaacacataactgaagattaataacaactaagctacaactaacatgttgacaatcacacaaacactattactctgtattttatttttctttcaaatcaggtgaattagctcatgaatccacttgacatctgttcaagaaaataaaaattatttttgtcctattcttcttaaacaaatttctctctctcttttttgggtccaccttggtaagcgaattcaaactatgatttatgttcagtttgacctaaaatatgtagatgtcatccatgactaagtacaacagtattaacaaaataacttctgtttgcttcattttgtgttgagtttaggttggtctaatattcccctccttagtcaaactactaataaaaaatgacaatcaagttgtttccgtttgaatgagtgaattaattagaatgtgaagattttataattacttgaattacaaatgtggaatgaaacccccactaaatttggtcattcacacggtatggaagacatagctgaagaaccgttcctctccttgtaattgcctttcctagtagttgagcaaaagataaaccaaaatcaaactgaataatgccgtcgcaaaccatggagttgccctggtgattatggataatttttaggtatgatttttaagtatttctagtattattttacaattaaatttggaattctatactagtaattagcatcaatcattaattttaatcttcatttcataaagtatttgtgatactgcacataaattttactattgattaattcttaaaaatgatctcagttaacattttttttaatagtaaaacaaattttattagtaaggatcaaaaaagtataaatttaggcagacccttgcacggttgcaccaagatacaatacatgtgttgtttgacatgcaaccggacctacaatacccaaattaatgcaaaacacattattctatcactttacagttccaaaacggccaaccattgtattatgcttgaatccaacattttacgttcctcattcacgcgacttcaaccttttcctagaaagcatcaatctttcatttgcagttttgcgccaaccacatgcaattttcattataaatgtcacatattcctcatttacctgtttcacacttcttgcattctgcatctttatacaccccacattgatataaaaaaactatatatggtgcacatacaaccaatacactcattccattctacgttccttgcacaccatgcatcatcatatccacgacttgccttccatacccactcaaaaaaccccttcatttttttggcacacccttgttaacttgtgtctcctaaacaaaccaaaggatttataagagtcactgaataaacaaatcttccccctctgagcctaatgtaggtttttttttttttttccaaaaacaaccaaactctctccttctcccactaaggaaactccaagatataatatgtatggtttttttctcaaactttatagaattatttgtctctcatatttccacaccacaacaaagcatgctgtcctaaccttctcattcactagtgagcctttatgatctcatgacataaatgttatttaaaggatagagtaaaataatactatttttgcgtttaaaacaaatatttataactcattattagtattgatttttccttaatttaagatgtgatatgaaagattaacaaaataaaaacagtcaaaaaaacaccttttcccatatatcctcgacatttattatatgataatgaatgaaggttctgaatcttatatctcatttaaaaatcaaacacttgaatttatgtagttaaggcattattttaaagttttataactcggaccaacttgggtagtccgtccgacaccaggtcgagtatgttgttgctcgatctagcgagcatacttttcacttttattgatattttttataaaataataaaatctatttcaaaatataaaatgattttttaaattcaatattttaaactaattccatttttttttataaaattactttaaattaattactttacactagggacgaatccaaaaatagataagtgaattgacaagtaaataaatgttttttccatcagatttcaagaagtaaaaaataaaaaaatattataaaaatattttttatatataaaaaatagaaaatttattcaatatttattttatatggtaatttaaatatttaatatcatatattaataatttcgcataatgtattattgaaaacataataaacaatttcttaaataaatactatgtattttatgtataaaaaaaagtatcattaagtagtttaaccaatacttgtaaacaacaagtggttaaaacttctcttaaaactaaattaaaaaataaagtaaggtcattggaaggaggcaactaagtaaagaaacacaacattaaattaaattaaaaacacccacatattattcatgcttcaatttcatttttcctcctcctctcaattagatattgtcaatattatatatataccattgaccaaaataaagtaaggtcttgccatgaacaacaattcctttgggttttctgtttttctggattgattttaattttgatgggtacaagaatggctagctcatctgaatattgggtgttttttggccccaagcgaagtcactagatttaaaatcagccttggaattgtccataatattttgtactaatgtgagttgttttggataattttcttgtcaagattgaaatgatgcaggtgaagagttcacatgtattgcttaaattatgtggatgttatgtgtcgagttcgaggttaatgattttgatgcatgtggatgtcgtagggattggtactggtaatgaacatgctagagttgatcgaagaatttgtgttgcttatattcattgtagcagacattctattttactatcagaaatatggcttccatgaactgcagtaagataaaaaaaaatacataaaggaaaaaaaagatatctcgaccgataatacaaaatgagaagataaaaaaaataggtgttttgcctttggatatgagtcataaccatccatatgaagctttatcctgatatgcttctccatgttcttatatttcatgttagtctttattgagaaacacttatgagacttgctttccctttattaagaatttgtacattcattttgtgcattaaattcaactatgaacttatgtattggttaaccactaatgaatgttaagattgtcattttaattgttatgcatttgggcgttgtataatgtgcatcaaactcttttttccccttttgcataaagagattgctctttacacaacctcaaaattttaacagtgaattttgctagtttgacattcatggggatattgatccactttttaaggtaaagttatggaagttattccacattcctttgatacttttcatctcttaatttaacccaactaaattttttatgggataggattaatgatgtgaactgaacaattaggtatcttggtattatagtcacacttgctgaatgtcagaaactcataaattttgcttgtttgcatttagcttaagttactattatgctatatgggtttcagagatgtgttttgtaatgcctggattcatatttctattatatttatttctttgttatattcaggagtacttgtgaagaggttgcatcccaataatgtatgtgataaggtttacatgcaatctccttttcgtgagtctttaataagaaagggaaaacttagaaagcaataattagttcttacaaagcagcataagactgctcttatacaggacgtggactccgttggcaatagaatccactatggttgtcttggtttccttcctaataaacgccagataaagttatttctttttaatgttaatgtcactatatgtttgtttttagttttgaacattttgttttccttttttttttttatggaattctgtttttcatgtgggtgagacnnnnnnnnnnnnnnnnnnnnnnnnnnnnnnnnnnnnnnnnnnnnnnnnnnnnnnnnnnnnnnnnnnnnnnnnnnnnnnnnnnnnnnnnnnnnnnnnnnnnnnnnnnnnnnnnnnnnnnnnnnnnnnnnnnnnnnnnnnnnnnnnnnnngttttttttttttttgaaaaactacttttttccctgtgttaatatgcttttggaaaggcttttggcttttagtagataacttgtctttcattaggtaattgatgttgaatggtggatcggacaaacccaacaatcatggagtatatcatacatgtgttaatttcaatattgacgttaaataatataaatgaaaaaaaaattcataaataagcgagatgttaaataataaaaataaaaattaaataaacaattattgaaaataagttattaacggatggattttggacgaatatttcattcgaaaattacaaacgtatcaatccgttgaaaattcatgacggaaaaatctgtcggtaatttctgacttaacataccgaccgaaatatccgtcggaaattaccgacggacaacaaaattttgtcggttaaaatttcctacatgcattttctcgacaaattttaagggttagcgacagatttttgccatcataaattaattttttttgtagtgcaaatgaggtaattttccatttgtgagatgattatagggatctttacctacctagatataatgtgatttggggtgcaaacagactaggtcaggccaggcttggttaggcctggccttggcctgattgaaaaatataaagtttggcctgacctatttacctgttacaggttttttttaagcttgacctgacctatttaaaagtctgttgcctacaagcctattaaaaagtttatttttaatagaaaatttaattttacaaaacactttaaatcaatttaagaaagttaaagaaataatttttaaacaaaaaatgtctcaacatcttacttatattttcaaataagtaataatcattttatgagattttcaaggtgattttttgaagtgattgatcatctattttcataatgatgaaaaatatttttagaaaaataaatatattattttttaagttttaatatatatatatatatatatatatatatgtgtgtgtgtgtgtgtgttaaataggtcaataggtctaacatgtttttttttaaagcttgagctggacttttttagttaaacaaaattttcaaaaagccttagcctgatctttataataaacaagtcaggccaagtcaaaggtccctgataggcgatctggcccatttccatccctaaatgtgatgtgatggtcttgggctccctttaaaaaaattaaaaaaatagaaagcaccacattaaggaaaatgttgatcagtatgcaacaaaggaaatgaaaacctcaaagaaagaatgaatatcatcgtaaagttgattgtggtaaatcatactattcacttatatttctcgtaagaaactcaacatatctaagctcaattgcaccccaaaaataaaaataaattatcctacctcctataagaagaaacacatggttatttccttttatatcttcaatttattatgaagtcaattaatgagttattaacaatatactaacttattctcatttcttgaaaaaatatttcttgaattatgaaagtgtcattatatctaatcaccaaccaattaatcttaaaggaacatctttggaataaaatttaaatttatgtcagtattgattaaaaataactaatttaaccatgttccttgatcttgatgaggtagtattatccaacaactatctcactcatctacttatacaagcaagctatctcactcgtccacttataaaagcaatcattatagtggctctcttgtgtccacatttgtcataattcaaaaagtatcaaattaaatggcttaaaagaaatagtattatgagacattctataatttatcaatacgggagatttttcaatctctttatgatgacaactcgtccatatatgcagatccaataaatgtgtggatcaaatcagactctagctacctcaacattcatttcaagaatatatgtagactacttcaattaaaaaccaaagcagatacactttatattggtagtaagatgaacaactagacaaacaagcataatacaagacgacaaatcacatgaaatccaaccgaaagaagactatgtgcaatcaagtcagatcatcctcctcaagttctttggctttcagcttttctttcaccctcaaaagaagggttgtcttccaagaatcctacacaacattcatgcaaacatgcaacgttgatcaaataccgcgacgaaagatatttatggaatgcaaatagaaaaattgatcagaagaaggaatctaagttgacaacggttcattactcagttgaatatagttacacaaaaaatagtgatgattatttttcctcaacttcctcctcacaaataaatttgtgatttgattccatttagaagtgtctgacctagattttccaatatgtagaatgtgatgaaaagtagagagagagcaagtttttaactaatattttttcaaggcaaaagaggttagcggaggcaaagcaactctaaacatcaactatgttggtaccctcaacgctacaaagtcatgaccagcaaaccagtaactcatatgtgcacataacgaatcaatatttcacgggaacattcagagcaaatgcaaattagagaaaataaagattattaaaccgttgtaaatcggagtaaatcaattatgacaagtttattctgctacaagatcttcactatattggaaaaattcttgttatataacaacaacaacaacaaagtcttatctcactatgtcaactaaaaattgtttcatcttacagcaatttagaacttaccaaaggggtcatgctatcaaattccttgataacttcagtaaactttccaacatcttcttcatcaattgcagcagcaatatcctgcccattttttttttttaaatcatcaatacttcagaaataaatgagcaatgaatcagtacgtgcaagaaatttttttttcataaaaccaaacattaataagaacatgatagcagaggagtcagttattgaaatttccaaaactagcaacatactgccagaagtctatattcacgtgttccagaaaatgttggatccaagtcctgcataaacaaaaacatatccaaagaatttagaaactggtgattttaccggtctcaagatgtaaattcttgaaaaatattggacctgatatcgctccaatgcattggtaatagcaataacatcccctttacaaagttggcaaatgccagcattaagaagatgtcctttaaccccatacttcagcaaattattgctgagagactggcgagcaatatcttcataaatctcaattgacctctgatatctggagaattattaaaaaaaaaaaaaaattgaaacagttaatattcaatttaacatacagagaaggctattataaagtttctttcataacaaattgttttctttacattattctagagttcctgctcaaattgaaaccaccatacacatcaatgtaaagaaaaccatgtatacatgtcaatagcaaatggactaatttttgttaaaaccatgtatacatatcaatagcaaattcttaaacttgagcagatgttaggggggaaaaaagataccaaaccatgatagcgggtgacgtagaggaaggccaacatactaaacaaaaaaaaaaacttagtaaccaacaaacatagaacaatagaagaaagacatgctcaataaggccttcacagttcacgtcaacaaacaagatcaaaacaagcagaaaaatagaaagtcttactgttctagctgggcagagaattgagcaactttttgcttgcactggtttgcagaagtgttcacttcttcattttcataaaaatcagctgatttttcatagtaaacaacggcctgctcgatattctgttcagactcatacaactcagcaatttcctgcacataaaaaaagaaaaatccaatccaatcatgatacattcacgagaattcctggaagaatgcctcaaaaaggatagccaagtggaaaaggacaccattttataaccaaatatgcattagccacactaaaataaagaaattataagctatataccttcaaatatctagcagccatagagagtcttccaatctcacagaagatatttacagcattatctaagcaagatacggactctgcatcgaaaagagagagaaatagaaccttaacatcgaacttcgattaagtgatggcacgcattatataatttgatcacgcgcaaaagcatatatgaatttgaccacaaacatacacacagaaaaatatgttcaattgttcaaaaatcataatcctaatgtatgtaaactgtaaccacatacataccatttatattagtttttttatagcaatgcgcagcgtcaacataagcttgtgcagcgtcatgcttgctttccaactacgacaacacgattcatcacaacaggtagagataatcaaatcaaagaacacaaagtaaataaaataaaaatccagaagttatttagttagttaccttcaaattgcaattcgctaatttgatgtaggtggatcctgctttgtcccctgaaaatgtgaacaaattcccgtgacaaccttaaccaacgtattaaataaaagacgcaaaattaaggttacatgatttagcgagcttataagaattggcggatttgtcgaagagatcagcagcgtcctcgaatttggagccaaacaagccccaaccgctgagcttcttctctgccttgttctcaaaatcctcggccctcgccaaatgatcacccatattgtaatgaatcaatcgatcaattcaattccctctctatcatgcaatctatgttaatgttaattgtttttttttttttttttttgagacagagataataatgtcacagatagaaactattcatcaccaaattggaatgaaaatgaaaagctatgtgcgtgcacaacaaaaaggctctatttctgtttcacacgtcaattcctcccattcagaatatgctttcccctgggtacgttcgttcggccatttcattgggctaggcccatttagtaacccagaaaacactgagttcaacttcatgtctaaaacctctatttaaaaaaataattacagagtgcttatttaaattatcaataaaattaagcaataaatgattaatatattcatattaatattgaattatttggatactattcaagttttaaatttacttatcttccgacagaacttcagattattcgatatctctttttccttattaactaaagaggattaaaactaaaaaatatcaataaaattaattacattaaatcatatttgtaattttaatatttatgattaatgaattaattcaaacattgaaattaaaattaattttttattacatattatgtgtacgaaatattctttgattttgactatgatcaatttttagtgaaaaatctaattaattatctttgagatttttctacaattaagttttttactcacaatactcatattcgagaacttaaaaaattcgagtccaactttagtcaaactagaaatgttaacaattgaataaaatgtactcatagtaaaataattccttttatttatttaatcgtaacttatcattaatgattagatttttaaattttatgataattaactaattattatattgaaaatcatatttaaagcggtttttaattgactgaaaatataataaaaaactttacattaataattataattaattatataaaaaaatcttataattaattatagttaataatttaaatttatgacaaatatagaaaacctatccttcccccttacggtccataacgattatccattgcattcattacaaacctattctcattaattttgatttttgaagggcatatttgagaaatttgaattgagtgagtggattaagatatgaatcagcaagtcgatccaattcccaggataaagactaggtatctcaaaaggctggttccagatggtgaagatgacaattacacgtcatagacgatttcaaattgcaatattttccttgagacacagagaataatacacgtgggcagagaattatgcatggacatttggcgagtataaaattccaattttttttaggaaaataaatgtttgtgccacctagtagataatgtcttttttagaacaaaagtttatttctcaataaagctaaacgaaattattaactacttcaaattatttatttgatttgataagaattcgtgaataaagaaaaaaaatattttccttgcagatcacaagtaactagaataaaaaatcgaatcatttattttgatcaaagtataattcttaatctcgtgtattaaaaaagattttattaaaagaagtatattttattgagttttcattgtaaaaatagttttagaatgtcagtgtattactattaaatttttaaaagaattgatttgagtatggagtaagttaaaaagaattatttatttttattttttactcaagttttgtattcttatttttttattagttttttgtatttttaattaaaaacagaaaaatatcaatcacaaaaattagtgttaatcgggatacttttggtcgggaattatatgggtttgcaggttctattagacacccgacatcacttttgtggagttgatggttatttttagggggttgcaaatagtttggaattataagaaatcaaatagtttattaagactcagtttatactctatccttaatcaatgaggacaatagaagtcacaagtatgctgtcatcatagaaaaaagaaaatacaattcaagatttgaagaatcttgattgagttgttcaccttgtccatactaatttgttggagggtaatttttgtgtgccttttctggctaagaagagcacttcacaaaatgttgaacttgtacgttatggagctctcccacacacacttgatgttcttccatacctttacgcaaatattatgttcatattatttgtgtgtagtcttttgttctttttattttcctaatgtaccaaaaaagaatcatgaaaattaattttttatagtaacttaaaaaaaatcaattagtgtgagagatagaaaaataaaagttcctatcatatagatttcattataaataggatatagtgaatgagtttgggttgagtttgataaaatttatgatctaattcaatcaaaattgaatgaattgttttagatcgattttttaagaaaaaaattaaaaacctcaattcatttgtaaattgtatgaattagattgtctcaacagatcaaaatatttaaatttatcttttattaaaaattaatatttttataagctaattttttaaatgaaatattaaatacattatttataattgtaacatatagtcaaataatgaaagaaaatatcaatggaggaatcacattatagttatcatcatcacatacattaacatactatgttaaacatgatttaaaaaattgaatataataaacaatttcaaacaccacacccatgaagtctaaattaaaaatccaaaagctaannnnnnnnnnnnnnnnnnnnnnnnnnnnnnnnnnnnnnnnnnnnnnnnnnnnnnnnnnnnnnnnnnnnnnnnnnnnnnnnnnnnnnnnnnnnnnnnnnnnnnnnnnnnnnnnnnnnnnnnnnnnnnnnnnnnnnnnnnnnnnnnnnnnnnnnnnnnnnnnnnnnnnnnnnnnnnnnnnnnnnnnnnnnnnnnnnnnnnnnnnnnnnnnnnnnnnnnnnnnnnnnnnnnnnnnnnnnnnnnnnnnnnnnnnnnnnnnnnnnnnnnnnnnnnnnnnnnnnnnnnnnnnnnnnnnnnnnnnnnnnnnnnnnnnnnnnnnnnnnnnnnnnnnnnnnnnnnnnnnnnnnnnnnnnnnnnnnnnnnnnnnnnnnnnnnnnnnnnnnnnnnnnnnnnnnnnnnnnnnnnnnnnnnnnnnnnnnnnnnnnnnnnnnnnnnnnnnnnnnnnnnnnnnnnnnnnnnnnnnnnnnnnnnnnnnnnnnnnnnnnnnnnnnnnnnnnnnnnnnnnnnnnnnnnnnnnnnnnnnnnnnnnnnnnnnnnnnnnnnnnnnnnnnnnnnnnnnnnnnnnnnnnnnnnnnnnnnnnnnnnnnnnnnnnnnnnnnnnnnaataagttaatacaaattaatgatcaatgagttgatcaacggatccatatattaaaacccctgacttaactcaaaattccatgaatttgaatgcattgagttaggcttgaccctaatgcaaaaaatattcaatccaaattgtttagattgatttgggtcaatttaaatttgtggatgatatatatccataaacatccctaattataaattagaataattagtgaaggcattagtaaaaaataagtttataaaagtcttttttataatttattttatacatatatgttaattttaatttatagataaacttattttatgttatgttatttttttttattttcttctcttatacttccgtaaaaaaatatttatgaaaaattattttaataaattaatcctaaatcttaactaatttcatgttatttaagaagtgatattcggagttccttttatttaattcagatttgatttccaatatcacatttgattatctcatttgattcatgagaattgagatattaacaaaatgattatcaaaatagaaaaaaaattaaatctcattcgtatatattttaaaatgatttagtttttttcataagaaatgattgataaaaaaaaaaaaatactaactgagaaaggataaaaaccacatggacatgggcttgtctccatccactccacaacattcatgattcatcaacgacacgacacccaacatgaagctagaggaatccatgtccaactcccacatcactgccccgctccttccaccgaaagatccgagtccgagtctgcaaaatggatcaatctccggagcggtgttcaacataacaaccaccatgatcggtgccggaatcatgtccattccggcgaccatgaaggttttaggcatagttccggggttggtggtgatcgtgttggtggcactgataacagatgtgactgtggagtttatgctaaggtacacaagttccggtaaatcctccacttacgcgggcatgatggccgagtcctttggctccataggatccctcgcagttaagatttgcgtcatcataaccaatttgggggtccttatcatctatttcattattcttggtacgtaagttcatctcaccatcaattccttctctctatattgttttatctcatgttcatcagtaagttaagtttacttgcaactcaaatttttcttattttggtaggattaatttttgtatacaaattaaactgtccgaaaatgttgttgttgttgttgttgttnnnnnnnnnnnnnnnnnnnnnnnnnnnnnnnnnnnnnnnnnnnnnnnnnnnnnnnnnnnnnnnnnnnnnnnnnnnnnnnnnnnnnnnnnnnnnnnnnnnnnnnnnnnnnnnnnnnnnnnnnnnnnnnnnnnnnnnnnnnnnnnnnnnnnnnnnnnnnnnnnnnnnnnnnnnnnnnnnnnnnnnnnnnnnnnnnnnnnnnnnnnnnnnnnnnnnnnnnnnnnnnnnnnnnnnnnnnnnnnnnnnnnnnnnnnnnnnnnnnnnnnnnnnnnnnnnnnnnnnnnnnnnnnnnnnnnnnnnnnnnnnnnnnnnnnnnnnnnnnnnnnnnnnnnnnnnnnnnnnnnnnnnnnnnnnnnnnnnnnnnnnnnnnnnnnnnnnnnnnnnnnnnnnnnnnnnnnnnnnnnnnnnnnnnnnnnnnnnnnnnnnnnnnnnnnnnnnnnnnnnnnnnnnnnnnnnnnnnnnnnnnnnnnnnnnnnnnnnnnnnnnnnnnnnnnnnnnnnnnnnnnnnnnnnnnnnnnnnnnnnnnnnnnnnnnnnnnnnnnnnnnnnnnnnnnnnnnnnnnnnnnnnnnnnnnnnnnnnnnnnnnnnnnnnnnnnnnnnnnnnnnnnnnnnnnnnnnnnnnnnnnnnnnnnnnnnnnnnnnnnnnnnnnnnnnnnnnnnnnnnnnnnnnnnnnnnnnnnnnnnnnnnnnnnnnnnnnnnnnnnnnnnnnnnnnnnnnnnnnnnnnnnnnnnnnnnnnnnnnnnnnnnnnnnnnnnnnnnnnnnnnnnnnnnnnnnnnnnnnnnnnnnnnnnnnnnnnnnnnnnnnnnnnnnnnnnnnnnnnnnnnnnnnnnnnnnnnnnnnnnnnnnnnnnnnnnnnnnnnnnnnnnnnnnnnnnnnnnnnnnnnnnnnnnnnnnnnnnnnnnnnnnnnnnnnnnnnnnnnnnnnnnnnnnnnnnnnnnnnnnnnnnnnnnnnnnnnnnnnnnnnnnnnnnnnnnnnnnnnnnnnnnnnnnnnnnnnnnnnnnnnnnnnnnnnnnnnnnnnnnnnnnnnnnnnnnnnnnnnnnnnnnnnnnnnnnnnnnnnnnnnnnnnnnnnnnnnnnnnnnnnnnnnnnnntattaccctacagttagtaagagagagagggagataaaaacaagaaaaatataaagatgataagtgaaatgatataatagggtgagaactaaaaaaatggtaatgaagtgtttgaagttttgtagtgttaaaatgtcattactttttttagtttttttttttatgacacttattcgtatttttggtgactttattcttgataagtgaatatccatggtttggtggggccacgttcggtttggttcagctacccattaattattattttttccttcctaaaccaataatttgtttgtaactataggagtaggtttaacaaaattatataatgcgcattatatacaataaataattattaaaatacccattttaaaatttagtaggatggattaatatgcatttacgtcttttaataatacattatgtgttctgtatgttggggtaaaaatataagaaatgttcatcacacactttctatttcactcttctaaatatattctcatttattaactaaatttattagaaataataaatatgtgaatctcattcttcatttttgttttatttttgtgtacaatgatgacaataagaatcctgcatctatttaatccctacccttaaatcgttcctagtaggttcactcttcatttaatacattctttttttttttaggaaatttaatacattcttactcatactttatatttttttataaaaaaattaaccaataataaaaaagtatgtaagaaaaaaaacttgttagttatcttttttatggtatacaatagtgacaaattaacaatgaggatgggtctaagttttcatagattttgcctgaaccacaccactaagctggcctaatgggttctcgctagccatactaaaataaacatttgaacaatggtcttggccataacaatcttcccttcaatgcaccgcctgtggcacaagtccacaaaaaagtttagtgaggaaggcgtcttgatcacctttaggtttcttaacccaagttacatcaccacccattattaatttgtgttagtttggtcaccaaaacaccttgaatgagattggggcaaaactttttcagctccacaaatcaattatgtgagttacaaggatcatgatcacaaccaaggttttaatatgtgatgccagttttgttgcgatctttgaaattgtgaaactgcatagttgatatggccgtaatttcagttgtgatcgcttcaaacaccttatcattacagccaaaatcagaaccctttcttagaatgttgatcagaattaacaactatgtgtggaaatgctaactgcattaacgatagtgatgttactagggaattcagggagcagttggaggaatggtggcatcaaaattaattaggaaatttcaagggtaggttgatttcatgaactatatagatacttcgaatgtcataatgtttgtacctttaccagacaactttatggacttacattttctaactattccttgtctatgatatatataaatttgactgggttcattggctttgttttggaaggagacgtgctctgtggaaatgagtcgaacggtatcacacacttgggtattctacaagaatggtttggcatcaactggtggacctctcgtgcttttgctcttctttttgttgcactcttcataatgcttccacttgttatgttacgtcgtgttggtcagtattactactatacccaaatgcacaagcaatttttcttttcttggcaaattaaacgtagcctttcatcttaggaacaattggctaattaagcacagtttatatattgttttcaatgttttatatgtacagattcactgaggtatagttctgcaatatcaatcctactagcattggtgtttgttgtaatatgctcatcaatggcggttagtgcattgttgtctggaaaaactcagacactgagaatagtacctgatttctctcaagtcactgtccttgaccttttcaccaccatcccagtgtttgtcacgggttttggattccatgtcaatggttagtttcaacattttataacttccaacttaattatatatcatcttttactttttcttttaatttgtcatttttcaagaaaaaatctatttatacgtatatgtaactattatttagatagtactgtattaagtaattattgatttgttaattataatatcataaaaaagaagacactagtgtttaaaatgttaaagtaataaatgggagaaataatgaacgtatgaggaagttataaataaatattaatataaatgaggagattaattatttatgtatatattataatcttcgaggactcataaaaaacagagaaaggattatttaacatcaattaattaacttattaatcccaataaatatcattttattcagttaaaaacgatggataaattatattttattcatttttttagatgttctcaacttatatctctatttatttaatcactaaattataggaagcttgggttagagttaaaaatgttaatttttgttactttaatttagaattattaacactttaaattgtgcttatatatttttcactttaacccgaattttagtggaatttagtgaacaaaaagtttataaagataagctaagagaatgtgaaattaaaagggtgtcaagaataaatcatccaataatttataataaaacacgcatatttgtttttttttttttttaaattcagttagcaaataaaagtggtggaaaagtgtaaaaggtgagaatggcaaagtttctattgtactatgattaacttaattacacatgacttggtgcagttcatccaattagagcagagcttataaaagttgcacacatgggtttggctgcacggatttcgttgataatttgcgtggctatttactttgctattggtttctttgggtaccttttatttggggactccatcatgccagatgtgctggtgaactttgaccaaaactcccatacaagtgatggtcgattactcaatgccattgttcggttaagttatgcactccatcttgcacttgtgttcccaatcatgaactattccttgagggccaacatagatgaactaattttctcaaacaaaaataagcctccccttgcatcagacaccccaagatttgtgtcactcactttgactttgctaggcctcacatacttggtcgctgtagccatcccaaacatatggtatttttttcagttcttgggatccacaaccattgtttgcacctcattcatcttccctgctgcaattgttctaaggtatactactaccaattaatttatatatactattatgcttaatttatatataaataattaatttacatcccattcctctcctcttctgagcacagggacatgcatgggatatcaaagacaaaagatcaagtgatggcaatagtggtgattgttttggctgtagggacaagcggaattgctatatggaccaacttgaatggttcaggggctgatcaatgattaaccatgatgatgttatataatacccagtcttctcaagttttagggaagcctaatcaaagatttaaactgatttagatcttctacagttgtgagaatagctgcatcagtctggtccttaatttgattaatttattaaatgataaatttatctttcaaaaattaatttaataaaaatttaaaggtgagattgagaattgcacatcttgtatttgattcaaacacgagtctgcttctaaggttataggtcctttccttaccacttgatccaaaccatcctaaattcgatctctttttcttccttttacttgttatatattatgttttaattttgttcaattattttctagaacaaccttttaggaaaataaaatgacacgtttgaataaatgagtaaatggggataaaaatgtaagttggaatacgtcatacaaactttttgaaatgagctcaattttgagcatttcaatttttattgaaagattgtctaaattctaaaagtacttttttttttttacaaataagaaagctaggatgatcagagaatgcaatttgataatgaaaagaccatgacatgacaatgcaatttgataatgaatttgacaggctcaatgcaaatgtaactcaaaaactttgataatctaattcatgtcattcgactctgaactacacaaaatcatatctttggagaggttgaagatcttcttacgaaatcattgtcgttgtataacaaggaagacagaagaaaggagtgtgagctaagtagcaatggcaaaagagtgttttttttataaataaaaacactagttaaaaaagtaaaagaaaaaaattgttggaagacaaaaaaaatgcactcccacatgatttttttaataaaatcttatttcttttaattatttaaccagttagggaaatggttagctcttatattaattcttaagatgttacttccttggccctcctatttataagatttttttagaaaatcatttatctctttaacaagatccttttttttttaattttcagaagcattaattatttttttccttaaagtatctttaattaattattctcttttcaaatattaactaattagatgagaaataattaaatagagagagaaagttaattttaaaaaaaaataatacttttgaaaaaataataaattattaataaatttaatatgatttaattattttttaaaaagtatgaatgaatcgaaaaaatcttattttaaataagaacagagagggagtattatcacgttttcaaaagaaaaagaaaatgaaagttattattatcactctatttttaagcttaattaatattgtctgtatttttactacgttattgattgatttcaaatgcaggagtgatgaccaattagagaaaaggtgcatgagattcactataatccacttccccgtccaagttcattttggttttggtgtccacattctacacgcttctcaccattcattctccaacctgtctcactcataatatataacacctgccacaagtcccacttcaatttataatcttacccttcactcttctccccaatacacctccacgtaatccattcaccaacggcattatggtaatccactaaccttaatcattgtaattcactccattttagaaatccaaactaaattatattcttaatgtattctatgtatttttcttaaattatacttaatatttcttttattttatatattatttttacttttttatgttaaagttattaattaattttaattaaaatatttgagctgacgaaattatctattaaaataaattacacatgtgtttttgtgtttttttatttttaattatataaaataccccttcttttttatttaatatgttattggtcttgatggacacaccaagattgttgatgtcaatgcgttcaagaaatcagatgtagcagtgatggtaaccgaagttatgacgggtatagtggagattctggctatgctggcagtgattgctcttgcgggagtgagtgcgcttggacgtagtgtttgtgggtgaagatgatgatgaggagaaatagatgatgtttggagaaggaggaagaggagaaggaggtggtagtggtaagtgaagatgagttgttgaagaaaaggagaatttataaaattcaaaatatgattttgaggaagaagatgaagatattttatatataaattttcattaaaagtcatatgaccagtatgtgattattaggagagaggaatctggtgtaatgtgaactaaacaattataagaaaatttttgtagagtgaaaaaaaagactatcaaatacaattacaaaaaaacaaaaaatgtgagttattctagataatattacatctaattttatatatagaaaataaaaattaatatttttcaaatataagaagaatcttattatttaatattattaggatattggttaaagaaattaagagaaaaaatagttatcgtgaatatcataaatataaaaaaagttataataacataattatatattttaataaattatttttaatttctaatcaatattttataaatattagttaatgtttatcttataaaaaaataatttactattaaattttattttatttttaatggttactctttttccatgaaaatgaatgtaatattaaattatcaccaaaataaagtacttttatagttttattaattaaaaaattatcttttaaaaataatcatattttacattatttaatgtgaagtgtaattttagaataaaaataaaatttatgataaattaaatttatatatttttattaattttaataaattatgtaattgtttctttatatatatatatatatatatatatatatatacatcccggaggtaatgctaatatagtatgcaacaactttagtttcggttttcacttttcatactcactcaccgccgggatgtcgccggtgcccggagcacacgcccctctcctcccgggatccaaccatgttcctccggcaactgtgtccggcgccgtgttcaatgtcgccaccagcataatcggcgccggaataatgtctcttccggctactctcaaggtcctcggcgtgattccggcgttggtgctgattctagtgattgcgtttcttgccgaactatcggtggagttcctcttgaggttcacgcgtgccggcgaaacgacgacgtatgccggcgtcatgagagaagcctttggtcccttgggaggagtggcagctcaagtcgctgttgtaatcaccaatctcgggtgtttaattatgtacctaattattattggtaagcaaatattagttacttagattcattatgaacttaatttttgttacttggactaattatgagcttatgctaattatttaatgtgttgtgtcatgtgtgttatttgatgcaatggacagcggatgttttttctgggaatcaacgtgaaggggaagtacacttgggtattttgcaacagtggtttggggttcactggtggaattcacgggaatttgctctgttcgttgtcttgttctttattttgcttcctttggtcttgtaccgtcgcgtaggtcagtgcccactacatttatgtttgatattccgtatttgggttttgtctttaatttgatcctattccagggaaattaatgtttagatggtgttcatggtagtcaatttttatattatgatgacatcggcaaattaaatcattaacgttcaatctcaagtccacagacattgttaggatatcatgtattcgaattattgtccgtttagatgtccgatcgacagtcacaattttgtgctagtaaagtgatttgggactctggactaccggaacacttaatatttagttatttgccttacaattttggttagatgcacttacttaagtgtttctactttctggtcttgttctataatcagaattggagtttcacttggatcatttgcaaaataaaagtttgtattaaagatcaagataggttactagatgaaacttcatttctaattggagaatagcatgttataagttttgtatttttggttattgatatgagatgtgcatagtcaggactaacatatttattttgttgtgccatgctatgctattgtttgctgtttttagagtccttgaagttcagttctgcagtatcaactcttcttgctgtggcatttgttacaatatgtaccgtgttggcaatagtggctattgtagaaggaagaacacaatctcctagactggttcctcgtttggaccaacatacctctttctttgatctgtttactgcagttccagtcatagtcacagcctacacatttcattttaatggtacctaattacttaccttccattttgttacaatattacacctcctttgaactttaaagaacctaaagatattttattgctgataattgttttaatttacttgcagtacatccaattgggtttgagcttgccaagccatcagaaatggcaacagcggttcgaatagcattgctgctttgtggtgtcatttacttttcaataggcctatctgggtacctcttgtttggggattcaacacagtctgacattctggtcaattttgaccagaatgctggttctgcacttggttcattgctcaatgttttagtccgtttaagctatgcttttcatgttatgttgactttccctctcctgaatttctccttgagaaccaatgtagatgagttcttcttccccaagaagcctctacttgccacagatagcaagagatttgtgagcctcactctagtgctgcttgtcttaagctacattgctgctattgtagttccagatatttggtacatctttcagttcatgggatcaacatctgcagtgtgccttgcctttgtcttccctggtgctattgttctaaggtaattaatctatatatatctctcatatttagtccttttctcttcatttgaacagttacaattgtcaaatagataaaaaagaatgttaccgacactctatctgatattccgtctacgtctaactgaaatttatttaaaatatcaattttggtggttcacatttttcatttgtttaatttatttttggaattttcattttttcataaaatgacagggattcttacggtatatcaacaagaaaggacaaaattattgcactgtttatggttatactagctgcgataacaagtgtgattgctatctccaccaacatatacaaagcctttcagtagcacctcgtaaatttgtgttttctttttccttttctatttttccccttatatagaaattttggtcaagggagagagagagagagagagagttgttctagacgcctttgattgttgaggcacttgggtttatacatttggatgccattattgtttgttgtaaaattcgtatatctagaacggagcagctatgtaaaatataaaataccaagcatgcatacaaaatgtgaaattgagatccaaatttagggttgaaagagcatgcatataatatgagatccaaatttaatgttgaaaggtgacaaagtttggccaacattattatttagtattctagaattccaagcgcaagtacaccgcgtgttgacatattggtaggtggtacccattattgagaacagatcctgtagccatacatgtatttatttattgtatgtcttgtcatttggtacatcaattcttttaacaatgtattataccctgtcattttccgcgagaaaatgaagcttaaatgctcaaatgatcacaagccaaattggtctaaaataagcaacttgactacatgtgatcgtttcttgttaggccacggactatgttccctagttatctatatgtggcgagctgtttgtgtgtactaatggtgtcctctatgcctacgtgtttaaaaaagatagggtgtataaaaaaaattaaaaaaaatctttatttttttttaaaaaaattattttttgacaatttaaaaatctttatttgaaaatagtgttctgataagttaatttttgtaatttattattaattgtttgataaattgaaagatataaaatactgaaattgaaacagaaaaaacatttaagagaaaaaaattttatttgaaagacacaatatgatggttagttattcaattgaatttaaatatttttatatcaatttctaaatattgtatagatgtacttttttttctttttaaaaaaatatttaaatatttaaaaaatattttacaaaaatcaaaataaatccgctacgatggatctagtggtggaggattcagtagtatgtacaaagttataagttttaactttgtagctatagttttaaaaataataataataattcaaatcgaagtgtgaggtatatcaaatataggtactaataagaaccaaagacacgtccaaatttcgtgaaaaaatataaactttttaactaactttgcttgacgcggttgcaagctcagactagggcatatcatcttcactaggggtgctttgattttgcaatgcttgaagtcaaaacaggggaataaatcgtattacaagataaagaatgattttatattgtttggctaagagttgtttaaaacatttgtcacagttttaaaatttattatttcccaagtatatacctagtaacctagactatatctgtgggcagtcaaaaaccgaagccgagagagcccgagaccttgaagctatgtttggataccccgaagaggatgaaatataattgtattatgttttattgtttgaattgataaaatgaaaatgaaatataatgaaaactattccattatttacctttattttttcccctcaatttaaaaataataaaaaaggattgagaattttattgcatttcatcataataggcttatacaatgcaattagttattttattctattatatgttatgtcctttatggcgtttttaatagtataaccttacccaggagggagattaatattatatgtaatcatttacggtgagtattacaagcaacacaacaatgaaagcataatccacccctgcattcattttgaccttaaagctttctgtccaattgctgaagttgctccttggatatacatcaattacctgcaaatatgttgtaatttaatttcgtcagtttgtagtgtaaaaagcctttttttaggggaaaaacagtgtatttcccctttatatatatatatatatatatatatatatatatatgatctaggtttagtcatgtattagagtcaatttaaataatatttttaatatgcatatttatataaattttattgatttgcaaccaaatgcaaaggtgatgtagtattcttaagcaaaaccttaagccagttgttgacatttaccttaaaaatgttatgcaaattaagctcaagattaaaatctgcttagttagtaattctataaccacatacctctgcaatcatggtgtctcctttgtaaactttgcaggacttgtcaatgtggctcccaacaagttgaaagctgctgatatcttcattgatgttggtggccatgaacacatcaagccgcggtttcatgtcaagagggtgggatcgttgaaccccaaaaatcagatccttctcctccgagcttttgcctctatgaaccatccaccgatgccgcagtgtgatcagcttaaccttcaatgtgtcatcacactgttaatttcttattctagtgtatgtaaattttatatatcacttaaaaatttaaaccattggcaacatgggttaaggttatacaacgtttaataaaatatcacaaaaaagcttattaatagcatttatttattaaaaaataataatatttttactaagtattagaaaaaaaatattattaaaaatcacattgtgtaatagtaactatacattaattgccacgcaatagattttataacattcacttaaacagaattatgaaagaatattggtgcttttatttgcttcatgtatatagatattgatactcttgcttaattatttcacagaatatatgtgaagtatccaagtccttaaagataatctcaaaaaagaaatgagattgatactattttaaaataggaagtgatttacaataaagataatttcaaaaaaggaatcagattgatactatttaaaaatagaaagtgatttacaatgacgatcaagtatatatgtttgaggagtgtttgtgacactcttttaaatcctctttttatgattgattgaatttattgaaaatcatcaattttgataaattttattttttatttaagataaattagcagataaaaatattaattgaaaaatcaaacgtatcaaaattaattatttttgataaattttaatcaatcacaaaaatttattcaaaagaaattgcagatagagagtgtcgctaggacaatgtccaaagaagtataattcttaatttagaagcagaattttcatacatgcatgcatcgattcctatatatttttaaaataatggtatcagatgataatacttattgtatctatgcattatatatagaggttaggagaggagtttatatactttctcacgcattgtaagtataggggaaccagcagcatcacgcatgactctcttcttgcgcacgtcaaggcttgagccatcaacttgaagcaagagatcaccgttaacatctaacacctcgtatcgttggtttaagaagaatccgcggtaattcttcttcacagttatttctgttgggtaagtcacacagaagctatcctctacaacactgatcatggggaacccatgtgccacttccattggcaattctggagcactggcctccattaaaaaaatagtgcctcaaagaattaacttcagaaataagagtttatggaaagaagcttaattaattttgcttaggattttgttgtttgtaagtgcagaaaacgtacgctttatatatgagagctgaagtggttctttcacgttttggtctccttgaattatcagaacatgtagaaaagcaagataggggaccattcttttacataattaatttcatcaagtgcttgttatttattaccaaatcaaagaacttgtgtttttttttatattatttctattaggaagcctgcttattctttgttaatttcagaagttcaaaatgaccacttttcgtatttcttagtcagctcttagacctgaagatagatatataaagagtaaaataaaatttctagaaaaattatttgttgaaatctttattcaaacacgtaatttgctgaaaactttttgtataatttctttgcctccggatttgattgtagaataagaatgaataatggagagagagagagagaaaaaaagcaccactttattacccttgtacgttttagactttttgagacaatgaatatacataaatatgatttttttttatagatataaatatgagttaaaattttaatgtaatatataaaacgagaaatgatacacaaataattttttaattttaaatatctcaccaataattttttatttatttctctttctgtaacgttacaaattaatcttatcatatttatatttttatcttattttatttctttttctagttgttaataaattaataggtgtccatcaaacatttttcatataaaatcattcaaagaagaaagtcaacaagaagttatagtagccgtaaatatgtatattttacaggcaatctggtgaatgttctaaggatgataaccatagtactttgttaaagaatgatgatgaatgagtacaacggagcactttttccctgtgcttttcaatccttatcttcacctcaagatctagccctgtcaaattagataagttcaatcacaccaataagaaggaaaagtagccaagccattctgttgaaaatttcaggctatacagtatttttctatatataccaaaaaacaaagcaggaacattagaattaccgaaaatctagcagtctgagaggcagcaaaagaaatcttttcgatgggttgagtgctgatattatccctccatttctttctatccttttgccatctttaccattctcttacctcaatggccatgcttcagtgcaactgtttctcgaattcaaagacaacggttttcagcaactacacggtataatatgtagagcagtagaggtacgaggttacgtacataatacagaggagaaccatgttgccgggctctactacatgggcctcaaaataagcccatcataaaatgattgaccggcctgattggtccttcttcagaatagacataagacgtccttgttcacttcaacggtaaaagaacccaaataatacaaattaaataaaaaattacacatttggggtcgttttgaaacaatttaccaatctggggcaggggaaaccgcccagaattgggcggcactggagccgcccaaaaccaggcggctcccagggggtagaaccgcctggttttgggcggctccagtgccgcccaattctgggcggtttcccctctttataaaccccaaattttcacttttcacttacattttcactatttcagcttcactctaaaagctctgacttctctctaaaagctctgccttctctctaaaagctctgtcttctcttctctctaaagattttgcgttggattttgaggcgatttatctcagtatcgaatctctgccaacgagtaagttaatttattaatatattttatttaattttttattatgtgtttaatttaattatttaactgtttattatgtgtttaatttaattatttaattgtttattatgtatttaatttaattatttattttgttgatttgtaaatttgttagagccatgttatttatttgatgttgtagaaaaacgttagtttataggttataggatttagtttaatttacggtttagtggtaaagtataataagataaggcttaagtagaaatgcgttaaacttcaataattttaggtttataggattgtagaaaatccgcaaccctaagaatcagcaacagtatagaaaaatgtttaaatttataggaatctgttggaggtggaaatgacgtgtgggcatgcgataatctgaatttggatgatgaataattagaatcgttgatcgctggttgagagtctaagagttggtgggtagggagtgtgcagaacaatactcgcgaaatggtgttgctatgcaattcggaatgaatcaggatatttgctggtatgtgctagaccattacaatgagaatccttgggtaagttatagtcagccagtaatggatacaaatttgtacttgaaaattagcaatagttatattaaactgacatatgaatttatattaactccctgagaaatctcagcgatcaaatataaattaatatgtcagtttaatataactattgctaatttccaagtacaaatttgtatccattactggctgactataacttacccaaggattctcattgtaatggtctagcacatacaagcaaatatcctgattcattccgaattgcatagcaacaccatttcgcgagtattgttctgcacactccctacccaccaactcttagactctcaaccagcgatcaacgattctaattcttcatcatccaaattcagattatcgcatgcccacacgtcatttccacctccaacagtatagcaaccttagattattggttatacgtttcatattagttttgtgtttatcggtaaagtacaacaatttaatttttgtaggatttatttttgaaataaatttttttgaataaatataagtaattagctttagggtttatgtaatttatttgtattgtaatttaattacaatgcatgaaattgttaattataaaaaaatttacatatattaaaatagtctgatagatggctgattcatcgtctccagcgtcttcacggtctacgtccgatgacgagggtaacatgttggatccgacgacctatgttgtaccttccccgtataaatggggtgttttactgaggcgtatccagagaacccatatttcacaggctgtgtggaacgaggacagatgtcgtgtgctaaagacgcgacgcggtaagatttcagggggcccagactgcgacgatcttcctggaatcgtttcggcgatgttagggcaggcaggattcctacatgtcgcacgcatgcgacatattcaggtataaattgtgtaattgaagaatattacagataatgtaattcctaaacattttttttatttatatcgttacatacgcattaattcttttaaacttgacttcagatcgatcctgcactgattagtgctctggttgagcgatggagaccagagacacatacgttccacatgccgcatggcgagatgaccatcacgttggaagacgtggctggtatattaggtttaggtagtgatggcgatgtcgtcactggagtcacggctgacgactggccaaccatcactacgcaggtatttggtcatcctcccctggagcgtgaggtcaaaggaggatacctgcgactgtcctattttgataggaattatgcgcaatgggctgaggtgggcggggagttggtagaagtcactaggtttacgaaggcgcacatcgcgcgtatgatcggagcatggcttctagcggacagatctggcggaagcactattgcctttcgctatatccctttgctggcaggagagatgacagatattgccaggtttagctggggatcagccgtcctcgcacatttgtttagacaaatgtgcgagtgtactgatccagataagggtgacattggtgggtgtcacgtgcttttgcagatatgggcgtggctcagattcccacccattgctccacctatacctcagcctactcaccaggagtggcattacggccacaggtatgtgtcattatccccttttattaattaggttacgagtcttatcagtattctaatgtcattcattttaaaattaggtttaatgctttagggaagtttcatccacacgaccttccctagtatcgggttacgttagattcccttgctcgggatgaggtatgtattgttatttacctaatttttggtcggttaagttggataatctgcatttgttttaatcatcgttgtttcgtaattgtgtgttaaattgttttgttcaggtggtatggcaaccctatgcaggctatcacttccttggtgctactgagcaggagcggctgttgtggatggctacgactcccattatatgcttccacacagttgagtattgtcagcctgaccgatgcatgcggcaatttggaagggatcagccaatcccccgaaggccaaggaagttgaagggcgtccacgacctatccctgcgagggaaacagatggataattgggctcgcaagctcagaccgtttatccgtcgttggggtaggaggcaccagcacatagagcttcccccccatctgactgggttcttgtcaccaaaccatgagtacatggtttggtacagggagaatgggaaacgacacattacgaagatggctgcgaagatggggcgtggtgtaagtgttgtgtaaattaaatttgtaaactaattttcattttcctggcgttattgtatggactaatgaattttttgtgtaatttgtagtttgatggacttgagacattgtactgtgccagtggtgggcagcagtggccgggattcagcatggactacttgcatgaagaagtgggtcgcattatgtccatgtttcgacagagctgtcggttggaagagcctggcccacaggtatatttggaggttccccgcgggcgtcgtgagggacatggactagagcatcgtcggaaagtgatacaccatgttcccgagcctataggagctcccatgcctcgcgttgagggttgtttcaggcctccgtggataggacccacatatggtagtcaacctttctactaccaatcgtcttatcagccagacacggggtatcaggggtttactagccagggtgacatggctacaccgccagagtggcaatcacagcatgtgtattgcgcgactactttcgccatggcattccaggggtgtgggactagcagtgatgttcctagtgggggatggactgaagaggagcttcagaccctcattgactgcactccaagcggttgtggagacgtaccagcagatccacattatgccaccccacctcctgattatccttacccagcatcgcaggagcagatgacggcatggccacctgtatatgcaggcccctctcaggcagcctcttcgcatgcaggcccctctcaggcagcctcttcgcatgcaggcccttctcaggcagcccatcctcagccagaccctactcagccacaatcttctcgacgacgtggtagacgggtgttgcccgatcgtcaagcgcgtcattatcagtggccacctgagtcgtagtgtggttttttatttatatttgtgtttatatttattttgttgcttgtactggactttattgagacatgtataacagtttaacagctttatgcacaacctggaccattttgtatttggttaacttttttactttattatgcaatttaacgctcacccttagagacttaagaaaaataaaaaacgtatcggcagataacatgcaacaaatacggcgtgactgaacacgccgaacaaatagaggcgtcaccagacacgccctaggttaggcgggacacaaaagggggtcacgccaacatttgggcgtcaccagacacgccctaggttaggcgggacacaaaagggggtcacgccaacatttgggcgtcactgacccttatataagggtgaccatccacaactcgtcgatatcaataatatggcatttctaggagaaacaagcagtcagaccatagctaattcaacattagccttcatttttccaaatggatcgatgaaacacaacgacacaggtgtttattttgagtgtccctctccaataccaatgcgggttcctgatcattgttcttttcaaacactgaagactaggatgtgcgacacccttatgctaagccgtgaccattttctggacgaaatctactatagaaagccaactgtacgtgcaggtcagcaatgtttttatcattctgttaaagttaccaatgataatgatgtttgccaaatgttaacgtgcaatgaacaaatgtcgagcgttggccctatagaaatactgtgcagcatcaacagaacacctgacggtatactcagcctacttgaatccacaatcgtcccaacacatgatgcagtgctatattacaacggcaagtggaacatcccacggcaaggcgattttgtgggatatgcattcaccggaacaaatccaatcagatttgacattctttcaggatgcaacattgaaacactgaaggatctaatcaagcaagttgtgcctgtcggccttcctccttatggaattcacaactcacaggtggtaagaaaattgttttttagacagccaacccattacgcttattcaaacaacacaatcgaatatcacataaaagagttgataaccgatgcagacgtgttgaaggtcttagctgaatccaactattggaagcgtttttgtccaatacacattttagctatttttagcaagcccgttgcccaaatggaagaagacatgtctgctacacaacatatgtgaaactgctaactaatgttgttattttcgtatggcgttattgttattgttagtgttattttccattttggtaaacactgtttattaagtgtggttaggccgtgtggttattttaattgttgttgttaactcaagtgatgtcgttattgtatttttcagttgacaaataatgaaaggctcaaaagttgtaaaacacatgtgcaattcgttacaatgaaatacattaacatccaagtacttaagcaaacatcataaaaaaatcatgaaacagcacgacgatccggacaagctctccgattatgtccaacagccttgcaaattccacatctgctgcgtctttgactggtttcgacttcgtccatctcgttccgaattttggtcgcctttggacgaccctttccacgcaacatttccctgtcgggtatgacaactggaccgtcactcagtggaatagcaccttcattaccaattggttgccacggaaatgagtaggcgtgcaccaaattacttatgaggaacacatcatccacgtactgaaaaggattctgacgcacatgtaaagcagcagctgcggcgtgactacatgggtatttgaaggccttaaacttgccacattagcaaaaatgctctccaaggttaactgaatatgtggtctcgcagccctcaaacacctcaaattgtgttcgttcaagattatatgtgcggacgtggtggcctgtagcaacggtctggttatgcctcatagcatccatcacatttttgcaatatggcgtggaaggatcaacttgtgaaagagccgcctgacccctagtcacaaaatattcaaccaatctgctgtacgtgtgcttcaccagagcagtgataggcatgtttcttgctcctttcgacaccctgttgactgattcggacaagttagtggtcatatggccaaatcgcctcccctctacatcatatgcacgtgtccacttctccttcgggatgctatcaatccattttgcaacctcagggctgctatcacgaaatcgtgctaacgccacgtcgaattgaatcatacagggtgtataacctgcaaaacaatcaccccattaacaataatctacttacggatatatccatttaatatattcacaaaattgttaatcatacctaaattcatcagcgtcttcttcaaccgttgatttctgaacttttgattaaaattactggcaatatgacgaagacaaaacacgtgatgagcatgaggtggttgccaacctggatgattcgccacagcagacagtatgcttcggtgcctatctgaaatcagacaaatgttttgcctttgagtaacatgcaaacgaatgttagccagaaagtatgaccaggcttccaatgtctccccgtcaactatggcaaatgctagtggcaaacattcgttgttgccatcctgcgtcgtcgcaatcaacaatttccctgtatacttcccatacaaatgagtgccatcaatctgaatcattggtttgcaaaaattaaatgcctcacaacactgtctgaaagtccagaacatgcgatgaaacacacgttttcctcgtacgagtcgatttgccacaaaataatctttggtttgaatatcataaaaagaacctggtgaaaaacgaagcatgtagccacaccaccggggcaaatatgcatatgattcttcccaattcccataaaccattgccactgctttctgcttcgcaaaccaggccttacgatatgaaactctaaatccaaatgaatgggtgatcctttcctgaaccaatgcaatcgacacagacggctcctccctgatcattcctaacaatgcaaatgtaacattcacggcaaaattaacaacattaaagaaccattatttaactcatatacaggaaattttaaaaatacttacctactacaattgatgcaataacatcagcatcaagctgtctatgaccctgtgaaatatggtcattcaggcaattgtggttgccaccccatcttgaaacagttcacttctcaccgaacgccggtttaattatcctaaccctccatgggcaaccctcgttatgtgcaacacacctcatggtaaacttgttaggcttgctctcaaccacatatgcttcttgatgctccttcatcaggttccgcttacatgcgatttgtgcgtcctttttgaaggcaaattcttgtttaacaaacaacggatcccctaatttccatggaccctgaactgaaccggaacaggaaccggtaaaagattcctcttcgcttggatgactccaatcaatgtatgtgtagtgaggaattctatcctaaaaaggagtcacctcagcaccttcaaataccaaatcaattgaataaacataacatgcacactaaaataatataacatacaaatatataaatgattttagtcatcttacataccttcaacaggttcttgtgattgtctacctcctacgtccggatggtgatggatttcagacgaccccgcagcagtgcctgcttggaattcagtcgcatccacaccgacatcgtcatcattatctgacgcactagcatcctcttcaagaagatgatcttccatggcaatgttgtcatcatcgtcatcctcttcgtcatcatccataacccaggttgggtcatgtgaatcttcctcagacacatttacagatggagcagcacatgacgcagccacatttgcaactggagcagcatatgacgatctacgcctactaggattaaaaggaactgacctaatgggtaaaacatcatctgccacagtatagtccacgtacaactctaaaaaatctttcgttgtcaacttaagaaattccactattagcaactctacgtcttcgtcgtccgcaacttcaaaacccatgtacttttcacgttgccataatcttcccgtaatacgtgtgatacattggttgtcttgcagacgtaatttttggcgtatcttcacatgtacatcaccgattgtcgagcttcgcttcaaaagtgtctgctttttttccccttcaaaaacaacaccttctctcccttcaaatatccttccattataatttaacacaacacggacaaactcctcaccacctgaactcatttgtttcactcaacaaaaactacataagttgaaaaaaattatgtcagaatatgttgttaccattactcataaaccatagaccctaccccttacactatcaattttataatataaacactaacaatttcataatacaaacattaactaaaccctaaacattaagtaaattcaattgaacaacacccaacttagaaaaaccctaactcgtaaccctaattcaattgaacaaaatcgtaattcataatccctaattcgtaaccgttaaccctaaactgaagtcactaaattgacaactaaactaaatcctacaacctaacattttttcctacaacatgaaataaacatgaaataaccaatatggatctaacaaatttaaaattcaacaacataatatattaaataatactcagaagttaaataaattaacttacctgttggcagagagaggtcagacaaaagctttagagagatgtcagagaaaaaatttatagagagacagaaggcgcgttggttatgtctgaaaaacgcaaaacggaaggattatatggaggggaaaccgccagaattgggcggnnnnnnnnnnnnnnnnnnnnnnnnnnnnnnnnnnnnnnnnnnnnnnnnnnnnnnnnnnnnnnnnnnnnnnnnnnnnnnnnnnnnnnnnnnnnnnnnnnnnnnnnnnnnnnnnnnnnnnnnnnnnnnnnnnnnnnnnnnnnnnnnnnnnnnnnnnnnnnnnnnnnnnnnnnnnnnnnnnnnnnnnnnnnnnnnnnnnnnnnnnnnnnnnnnnnnnnnnnnnnnnnnnnnnnnnnnnnnnnnnnnnnnnnnnnnnnnnnnnnnnnnnnnnnnnnnnnnnnnnnnnnnnnnnnnnnnnnnnnnnnnnnnnnnnnnnnnnnnnnnnnnnnnnnnnnnnnnnnnnnnnnnnnctaccccctgggagccgcctggttttgggcggctccagtgccgcccaattctgggcggtttcccctgccccagattggtaaatagtttgaaaacggccccaaatgcgtaattttttatttaatttgtattatttgggttcttttgcctcacttcaactgtaaaagtgccactcgagttacattagtagcctaattatcacaagaaaataatggttaaaatgtgtttttttttccaaaaaaaaaaaattaaaatgttaggatttcattcttgcaaaaaaattagtatatttttttgtcttcaaaaaattgaactataacaaattttaattcagaattaggttatatatctaaacttatatcttgtaatttgtgaccattttttttttttgcaatttaagactataggaattttttgattaaaaactgtaataaatgtaaatgaaatgtataatctatttttttcatatataatatgaatctcattttatgaagaatttgtaatcataacttgtatgtatatataagtagtgttatttcaactttgatgtctcccataattctaataagtctttatctcttaactcacctattattattattattattattattattattattattattattattataataatagactagatactattatctttttttatatttttatctactagatataattagtattatctattccatgcaatgcataatgcataatgccggggtgtactactactatagtatatatgtactgaatctattgtaacctcacactcacctggcactccctatagactcgtggttttcaaattaggagtgatgtccttttcaatatatttgttttttatcctcttctctacaaatggttgagttgtgactgttcttcttcccagtgcccgatgactagaacccttgttcctgtgggggctgactgcatcaatcgctaccaaatcacagatatatatgaaaaacacaaataatgtaacaatttctgccactccaaatactatatccgcaaattcacaaatagacacaaacagttgaaaatataaaaatcaaatcaaatcaaatcaaatatatatatatatatatatatgtatactgctaaaatgttatttatatatatatatatatatatatatatatatatatatactgctaaaatgtctctcttcgaaaagacctgataagcacaagtgtttctcgctctctgcccttttgaggcatttcattgtttgctgtggtggattttgcagccttgtgaagaagaagctctcgagttcggacaaacgacacctcacaagtcacaacactgtatatcttgcttaatcattcatgtcttattctcacattttactattatgaatgttttttttatcaaaccatttttttgttattcagatcacattcttctttatatatggcagaagtacctttatacttcaaataataaatctgtcgtatgaaaaaaaaaaaaaaaaaactgtaacagtaaatttatttcatctgtatcgaatgttttccactctccaaattcaaaaacaacgtggaagagataatttttcttttttggtaatggatactaatgcagcaagtccaacctttgcgggtcaaaagacccaccagatcagattgtttcctataatgaaaagaatgaaggtgctggtcagatcgacgaacaagtcatgtttctccaaaggtattattgttctatcaatattcaaattagtatatgaactggtgtctatagaagagtgataataagtagcaagagaatctccatgatgatgtaggagactatttttatagaaatcaaataaatatgaatgagtcacaacctacctacaagctgtagcctcaaaatgcagagataagaatggctagcgcttctcatatggtgtactatattggatgcatttaacttattcacttttggtcctataattttaagattgtataattttagtccaaattttattgtatatttgatcttctaaatttctaaaatttgacaatttagtttattgttagtgtatcataaacttgtttaacaaaaattgctgatataacactaacacgttaacataaaaaatagcatgacagtctaacaaatatatgatactattacttaaagtgacaataactgttcaaattgtataattgtaatattgtcagcatactattatttagtattatattgatatatgtattaatctgttaggttatttgtcatgttaaaatataagtgtcacatcatttgtaatgtgacatttaagtaattttatttaaaaaatcaacaatagtggtgaatcaaaaattttaaattttaaaaacataaaaaatcnnnnnnnnnnnnnnnnnnnnnnnnnnnnnnnnnnnnnnnnnnnnnnnnnnnnnnnnnnnnnnnnnnnnnnnnnnnnnnnnnnnnnnnnnnnnnnnnnnnnnnnnnnnnnnnnnnnnnnnnnnnnnnnnnnnnnnnnnnnnnnnnnnnnnnnnnnnnnnnnnnnnnnnnnnnnnnnnnnnnnnnnnnnnnnnnnnnnnnnnnnnnnnnnnnnnnnnnnnnnnnnnnnnnnnnnnnnnnnnnnnnnnnnnnnnnnnnnnnnnnnnnnnnnnnnnnnnnnnnnnnnnnnnnnnnnnnnnnnnnnnnnnnnnnnnnnnnnnnnnnnnnnnnnnnnnnnnnnnnnnnnnnnnnnnnnnnnnnnnnnnnnnnnnnnnnnnnnnnnnnnnnnnnnnnnnnnnnnnnnnnnnnnnnnnnnnnnnnnattcgatgttatatagttcttgcttcgtatatataatcgtattttatcattttacatggcaatgtctttttatttgttgaaacgtctgttaattgcaatttgtctactatagctataaaagagaagaactaatgagccttaattaatttatacaagtaaaaataaaatacaaaacttgacttatttgattaaaatttaaatttgaggcataatgcatttaaaagtataaaatttgaactcggattatttgatttgtttacaatttaatgatttttttttcttttatcaaatccctttttcaaattttcccctcatgttagttaaggtagtatgcaatagatgttttatataagtaaacttaaagaaaaaagacagcaaacaaatattttttaaacatagaagtgaagtatataatatattattttttctgattggtaattaaccttaatcaatatataattatgtaatatgttattttttatcattttatgtagacatatcacatagttcttaatgtcaaatttataatatttaactttaactcatttacataaatttcacaagtcaagtgtaaataattaataaatttatttatatatatcatcccaaccctcttcaaaaatgcgatttaacaaatttaattcaagttcattaaaattatgataaagtattttgatactatatattaaatattatatttttaatgaatacattttatgttaatttttaattaaatttttaaggagaatacttaacaaaatcgaattaattattttattatatgttcgcgaaggtgcctttttcctatgttattggagaagcgaccaattgatatataaaatctttccaaacgtaaaggcagtaataacttggaacccagaagagcttttggcagctagccattataacagcagcaatgtgaaaatctgatactaggatcctatcaactttttaaagaaccccaagcattggaatttgcagataaagagaataataataagaaagaagaaaacaaagttgctgatttaatagtgtatattgttattaatgttcgtaggcaacaaaattatggcagagaaaggacaaaatggaatagctgtccataatgcaaagattttatctaattgcagaaattgctctgtactgaatggaacacactcacaacaacaaagcgctatgtagggtgtatctagctagcttatataactatatgtttacttgtatgaagaccagtggacagtgacccttttattctccttcagatgaaaagcctgagtctgaatcgttatcatatccaaaaaataaaaatgctaggtttggaaggggaagaaaagcaaaatgcaaggcataagagaggataagaacttgaacattgaacatgataaacaattgggtcatctaagagaaaaaagaaaaatagtatcataattatttttataatgtaaaattaatttatatatgtccttttacttttgaagaggataggtaactttctttttcttctcaaaacttgcgacagacaagttgattttaactttacccgaagttatttttatttcactttcttaattttgtttcttataaataccattagaaaagtttatattaatttattaagttgggataaataatgtgtgttatattttaattactttattttaatgtgaataaatttcaattattcaagaaagcctttttattatatatgtatcttttaacaccgtaccattagcaactaatttttattaataattttagaaatttaaataatgatataaaaattatgtttaaaatcaatagacaatatatcatacaaatatttaaatttcatttcatcttttaaaaatctataaaaagaagctatgtttagttatctttcagagtcgtaatacacattacttacaagagagaaaacacgaaaaatattcagactgaatggctcgatccgtggaataggtcaccttgactaaatcagaaagtattgatcgaggactcatcagttcccacatatttatcaaaaggttattttaatggttcatattcccatgaaaaattaaacatacatgagactgtttaaaattaacttcaggcttatcgaaagttgttgggagcggtcctacatatgcaagtctcattcgtaattattaattcattatcactaaaatattcctttatattaaaatagactaatataatcttgcagatttcacctcttaaaaaaaataatatgactcttagaaattaaaaaaannnnnnnnnnnnnnnnnnnnnnnnnnnnnnnnnnnnnnnnnnnnnnnnnnnnnnnnnnnnnnnnnnnnnnnnnnnnnnnnnnnnnnnnnnnnnnnnnnnnnnnnnnnnnnnnnnnnnnnnnnnnnnnnnnnnnnnnnnnnnnnnnnnnnnnnnnnnnnnnnnnnnnnnnnnnnnnnnnnnnnnnnnnnnnnnnnnnnnnnnnnnnnnnnnnnnnnnnnnnnnnnnnnnnnnnnnnnnnnnnnnnnnnnnnnnnnnnnnnnnnnnnnnnnnnnnnnnnnnnnnnnnnnnnnnnnnnnnnnnnnnnnnnnnnnnnntatatatatatatatatatatatgggtgtacacgagtcaagtttgattaaatttgggaaaattttatacttagtcaaaatacttaatttaaattgaattgattggatttatgtatatatttttttaaaacttgaaccaattcagcttgatcaataatgagtttagttacgttaggtatgttgaatccaaagttccagattttctttaaaaaataaataataatttcttaaaaaatattacaccaataggttaggtcatcaattcaaatgtttaaaaataaaattcattatccaaactaaaaatgatcaaatttgaacagttctaattggatttaaacttgaacaatgactatacttaaatcaatgtgtttggattgggacagatcgagtttaacttattacaatcttacccgaacctgtgaacaaacaccctttgcccccaaactcgttacctcatgtttgtagatacgtacgtatatatacaataaaatgtttggctttcttgtttatattatcttgacagattcttgcattgtggccaatgctacatgattctcttacctgtccatgaacaacaaaaacacttgtctttcaactttataattttaataagttttgtttgcattgtcacacattggcatgtgaatgtacttttccaaagtgcaactcacgtgagttttgctatctcgcaagtaacaaaaatcatagcatactaatgtacgatattacaaacgcaaaatagttcaggataagaagagaaaataactagcttacggaaaattaaactcatggatattataattttaataagttttgtttccattgtcacacattggcatgtgaatgtacttttccatatataattacaataataataaaaatagataaatattggcatgcaggtataagttaattcattttatccttcggattatatatgcagatctaccgtataggcgtatagccagttagataaaatggaggctctgtgaaatgtgtgaatctgctatcggtttcattttcataaatagagacaaacatttcagattcattttttaaataatttggaatgtcacgagaaacttttctgaattgagcaatagagttctctgcataattggaccctgaaaaatgtttctgtttttggtttcattctggtctcatttggtcacatgatattatactaatggacaccaaaacgcgtacaggtcagcaacatatacaatattgacattactcgcattcatcatatcatttactaattttaaataatttacgaaataatagcatcactttaatctatgcaattaagcagcatgatatagtaatcattcggcatattatatacatagttgcatgactccaatcatacaaaaagcctaccgtacatatcatattcatcgatcatgaaacatgcgtaagtaaaaacattcaaatccaaattaaacaaaatcttctcagtctccaactttattgcaactaacaactcttccaagtctccaactttattgcaactaacaactcttccaagtctccaaggacactccagctataaagggcttaggctccactattaacaagaaatatgaagttagagcaggataacgcaacggagtgcatttattttctttcattcttaattaaaaacacagagtacaaattcaatgtgatccgtaaacaaacttaatcaatgataaccacttgtaaatcatctggataagttgttgcaacatataattatgctaaatatttatcagtctttttttggtgatcatgcatgatttccgccattagtattatattcttattcgttttgaatataattgccttagtgtaaagaaaaccctaaatcaataatcttgcccgtgtacctcacctggctcaccaagcaccatgcagtttttgtgcagtttaattggcatcaatattaattacttactcaattattggtttttgaatcaaagccaattaattattttagttgaaatgaaatgctaataattaagggggtgtgtgtgtatacgttggaaaaatatagaaaaaacgtgaggttagagaacttaatcaggatttgtaaatactcaataatattttaattttaactatttatttaaattatatgattaaggttagtaaatgtttatgaaaaatttgctaatatactagcacttctttttttaaaagtaccttaacaagttataattacgattttcttataatatattaaaagtgaaactagataataaatatcttatatatatatatatatatatatatatatatattaaatgttattataacaagccactgttnnnnnnnnnnnnnnnnnnnnnnnnnnnnnnnnnnnnnnnnnnnnnnnnnnnnnnnnnnnnnnnnnnnnnnnnnnnnnnnnnnnnnnnnnnnnnnnnnnnnnnnnnnnnnnnnnnnnnnnnnnnnnnnnnnnnnnnnnnnnnnnnnnnnnnnnnnnnnnnnnnnnnnnnnnnnnnnnnnnnnnnnnnnnnnnnnnnnnnnnnnnnnnnnnnnnnnnnnnnnnnnnnnnnnnnnnnnnnnnnnnnnnnnnncctgtataattttgtttttttttttgccacatatgtacgatacatttaaatcaaatagatgataatgacctagctagtctcgatcgatcccacgcccaaccaagtcttgttctttattgtcaatttttcaatgatgtgccagtcagtacacatatttacctttgctttttaacttgaacttcaatgtttggaattgactagcataaccttttgttagcatgtgttttttatgaggctgctatatgtctcattcaattaatgcataaacataatgtgttttatattttaattaaataaatgcataacaaatattaatcatgcatgataaagactttaactttcaggcatattgataatataaaatttgtacactggtttttttccacagcaaagcaattattattattatagattaagaagactgaattttcacaaggagtggcaaattattcaatcacaacattatacagagaacagtcccgtgagtgaccaatttgtacattgttaattaactaattagaattcaccttaaatatgattttaaaatggttattttaaagctcaataattttattatgtatgataatttattattagatgataatgtaatttttacataactaagttaaaattaattatataacatatagttagtctaggttaaattgaacttaaatctcttatatatatatatatatatataatatatagttttagggtttgaattttgtagatagaaataaaatttttggaaaaaagatcctactaaaaatgatgaatctaatttttcaatggaaataattataaatgccttaaattcacaaattttcctttttgcttcatctctctccccatgaattctagcatcggatttcaattgaatctgaaacgtaatagaccttcaagatgaaataactaatggatgtcttccctttgggacaatagggaaacttcgataaataaaaaaaaaaaaaaaatccatcagagaaaactaccctcgtgatcttgctgttttatatcttaaagttgaggtttattatataaaaaagtactaacagataaaaacatttatttaagtgttaaatttgtttttattggttaataaaaaaataaaatattaatatataaatatacattgtgaatttatattaacaatatgatgtataatactaatatttgatgtattaataagatatactcatatactaatagaattccctgtttgtatcaagtacaattctgttaatataaagtcttaaatctcaatatcaacagtttaatttttatcaaacaaagactatatattttgaagtcatataaaaaagactatcatatatatagaagttaattaatctaattttaaattgtgaacatataattcttttagtgattgtggcttttaattaattaatctgcaaatcatgattggaaaaaaaatactattgttattgcgtgatagattaataaaagacagaagaatctagatagataaatgaattatacaataaacgaaggttggtcaggaaggagtatgatccatatatatgggtccaacaaagcattgtgctcgaggttgtggagggaaaattgggggtcacaggggaaaactagcaactagccgagcacactaatggaatctaaaaggctcgaggagagttcagagcaacaaaaatacttttatggaaggcaagagacaaggtaggagcagggatatgtgtatggaggatattgttttgttgtgatgattaatgggcacgcatgtgaatggaggtgggtacgtgatttgtccttgtggaatggtgacaatactggaacacggaagcaacaagaacccaacagctctaaatacatatcatatcatatgatccttgtcattaatatcatatgtttatatctctcggctggtatataagctcattataattaaatacactcatcaaatcatgtgttgaagaatatcttgaattaattaaaatcctatgttctttgttattaagtttgtgttagggtaatacaagtaaaagtgacgagtgaaaaatgatcatgagccaaattattattaacattttaatgtcaaatgcgatcatatcacagttttatttagaactatataataagtgtgtttaaacgaaaataatactaagttggatgagggggccgggttaggataattttccataagattctaggttcaagatttattattatcattatacaaaagaaaaagaaatagtagcattctgatgtttggatatgcaggtatatcagtctctttcatgcctttccatcaactcttttcatttctattacttgtacctaacaccatagatagttacaattatgaatgtctttgttttcagcggaacaaaatctttgagcttggaagcacggggaaaaccacaaacaactatgaacttcaaagattaaaaaagaaatgctaatttatatgttgttacggttaaaagaaaaattatgctcagggtagagtcccctcccatttttttcccttttgtttggatatctcatacctttcttataaaaaacaaatccgttgtgaaattaataatgaagtttgtccttcctttccagcaatgcatttctgtctacttgaattattgacaatttgacattatagagactcctaattaacagcttaactcaacacaggcagggcaaattagtagcttgtggtggtttagtccatgtgattgacaaaaaaatgatataattttccgaaatacatttggcaattgttagattaatactggatctaattaataagaacatgatcatggatttatgtctaactatttttttataggtaaaaggaatttattgatagagaacaacaggtactctaaccacatacgaaaaagcttttgtactaaaaacacagagaaatacaagcaattggattatgcaccaatcaagaaaagataaaagtttgctacctagattagattgaaccaagaccacgagtgaaagttaatcaatgggtcatgaatttatgttaaagttaaatgcacttatatatctttttcaaacggctgtataattagtctttttgtggtattaagaattttttattattagaaaaaaattattataaaagaagtacaagaggtattccaatacttatatacaagaaatccaaaacatcttcatttatagtctagttctttaataggctttctatacatgcatacatgacaaagggtagaaggaccaatcttacaagacatacatctactttagaaattatctaagtctaagccaatgagtacaatttaataatatctacagttaaaagtaagttcattacggtgtaaacaaattaactagagatcttgcaaattaagtcaccgtccatttttttcccttcaatttattcctcttaatcaaactcctatgctgaatcaagtgagaactaaatccaacggttacactatagagaaatcacgtcatgcatcaaagctattaaattccaatcagctttgttaagtggttaaaatttcctttatactctctttaattttattcacttatgtaaaaacttgactcgtgcgtgttaacaattataagacttgagtttataacattcaaattatttcacttaattaatgggacctgttacttatacatagtgtacacgtaagttgtctagttaaacagtaaacgtgactcttgggttatatctttacaaaatcaagaaatttagatcagaatcagatgcctttttcaatgaagaaaagaaattaataataaactattagtatgatatccgctgagcgtttctttattggacaagctaataattgcaacgaggtaaaagtggatgcagtaatttcagtgtccgtgatttgaataccacagttcaagttatatatacagaaattaatccatatcatcatgtgaacatccatgtcgaatttatgtacagcttttggatatatatggaagctagacaagagataattatgtatgaaaattgatgcggtttcaaagctaataatggattctaatatgtttattggcactgcatggaacctccagctagcaagaatacatgttataatcgtaacatatgtacgaaacaaaagcatataaatcagcattttaatttcactttcaagcgggaaaagagagagagaaaaaaatgaaaatcagctttaggtgtctcatatacgatgagaagggtgtgatggcacgtgtggagagagaaggagaaagaagacaaaagtttgattgctggttcgagaaaggatcgagagtggaggagagcctaaaaagcccccgtgaggagtgtttggaggcattccaaaatcacaactaaacatccttttgttgcttctccttcacttctttcgatggccaattttcactatcacgagttgatgattccccttctcccattttttcttccaactcaaaaacttatgccaaatattacattttttccaatatacccttgtgctgttcatagctaaatataattatatttccttagtttaaaaactaagcggcacttcctattttcctggcatacagctatatatataaattaattacaaactatatatataattgttcctgtaaaactaaaataattaaattagatgttctcatgacttgagtttgaatttaaaattctgttgatttattatttattatttcattataactctttcataaggtaatgcatatcactcaacatattattttgggaaagtttagtattaagaaaatgatcatttttttaaaaaatttgtttcagaagttgacagaaattattattgttttaaaacatgataaactaacacccttaatttttaaataaataaataaaaaagaagccaattcaatgatctagtatactgctattagatatgtattatattaatgaaattccataatcttctagctgcaccacatcaataatcaataagttaacacttggcaaagagaaagaagcatttcaaaattgggcaaatggaaagactccaaaatatataaaaagggtacttttgtaaaaccaaaatgtatatagtatttatttatgaataaactgagacggtcatgtgggaagaaaacacatgagatcatatggatttgagagctcatcccttcttttaaatgaccacagaactctgcagagttgatagcaaaagaaaagcaccagagagaaagaaagccagaagaaggaacataagaggagagagagaaagagagagcacacaaaatggtttccaaagagcaaaagagagcagcactgcatgagaagctgcaacatcttcgttctattactaactctcatgctgtaattccctgcattatctcctctgatatctttctttccattggatttctccgtgaatattctcaatgaaataagccaattgcctaaaagaatgttcagttagacagtaatattgttatacagttatatatactcccctctgctattcaattcctcttccgaatttgattccatttttgttaaaggaaacaatcttccttgctatttttcttattattcaaatcttacatagtcatatatataattttctttatccctattgaccaaatccatattcattctttttgcatctatgattatctatctatgctctcatttccatatatatctgggtagaaaactgaagcacatagaaataaaatgatttatgatgaatattaattattccaatgtaatatcattgaaaatagtgatggacaactttctttaatttaatatcatttgtcttgtaaaccaacgcatatatatatagttgtttcctatcaattatatgcagcttattgagatagtaaactatctgatcatcatcatcatcatcatcatcatcatcatcatcatcatcatcatcatcatcatcatcatcatcatcatcatcatcatcatcatcatcatcatcatcatcatcatcatcatcattattattattattattattattattattattattattattattattattattattattatatgaatggttgatggcagctaaataaaacctcgatcatagtcgatgcatcaaagtatatcgaaaagttaaagcaaaaggtagaaagactgaatcaagagatagcctcagcagaaacttcaagtgtcaacaaccctttgcctatggtattttcttaattgagaaaagttaacagcatcatctatattcaacaactccagtacatatatgtttgatcaagttccttgcaatataaaaacattgattggagtggcatttttgctgaatggacttgtgcaggttacagtagaaaccctagaaaagggatttcttataaatgttttctcgggaaatgggtgttccggtctgcttgtttccatattggaggcctttgaagagatgagactcactgtacttgaagctagggtttcttgtacagacacttttcgatttcaagcagttggagaagtaagatatacacatacatagcaaagaaaaactattacaattgcttatttattttcaacatgtgtatcattgatctctctcaatactttaggatgtcgcatgtgttgtccttttataaaacgttccttattgggggacgccagtaaagggacatagttactgtgtgcattaattgatggtcatgcatagacagtgttaaattaatcttaaccttaacaataatagagtgttcattaattgtctaccacatacaatgtctttcagtaacgaattaatattatacattttcttgcatttttctccaatgtatattcatgtatataagaatgacggcaaaatatgaatgtaacttttgtagaatgaagaacaagcggagacaattgatgcacatgctgtgaaacaagctgtggtacaagcaataaagaattggagcaaaagtggcgatcaagaagagtaaatcagtatatattaaaaattggaagctatcttgtacgacgcttgattcctcaaggaacaatttgccagttagccaacatgaagcaaaatgggataagaaaaaaaatggaaaatgatatatatatatatatatatatatatatatatatataatgccagctataagagaatgataaagagtagttgatggttgatcaaatttatgtatggagccagcatatacatatctaatataatacccacatatatacatgttacggaaattggatcggataaagcaaaatatgagatggagaaaaaataaaatggggagtaaaatggaacacagacaagacacaagtatttaacgtggttcggcaatatgcctacgtccacgggcgaagacagatcaagagttccactaaaatgaagaagagtacaaaaaaggaaaaataacactcaaaacccaaatcccaaatacacccaataatcctcacaaggatatcacacaaaattgggtacaaaagaaaaaatacagaaatgggtattttttctcacttgatgtttactctcacacactcctaatttttccttcttcttcagttgcttctcttctccataaaccgtttgttacgctcctttatataggggttgcaaaggaagtaacccgtgagctactgtgcgtgatttgaagcaaatttcaacatttgttgctgtgctttcggtgcatttaaagctattactgcgccttcattgaaaaaatagcatgtactgcgcgttcaacaatttctgcgcttacaacaatacatataatgatgcataaacaaatgaatatataatgcattttttaatatatatatatatatatatatgaggtgtcgaaaattataattaggttaattaacctcacgatgtaatgaatgaatgaatgattagttatgagtttaattttcttcaaatcatgccaagattagttccctggacaatgttcttaaggtcaaaagtaaaatgaaatgaggctaaccagatgagacacgtaaaacttgaaatggcacctccctaacggagtttagtacaaagaaaggtaacaaagatgttgcctactgaaacttcaagcaatgaaagttgacacctcttacacatggaatacacaagtgatgaatgttttcaagttaatcatgaaccgaagacacgtgatctcacggtcgctcaggagctgcaccatcctttaggcttcaggttataaaaatggtctttgcatggtaaacaaccgaacgtataaatttgtaaataaagtatattgggcctttattctttacaatgggcacatatgttcttctacagcgccctttggactcttgaacattatatacataatggggtacgcttttgaaagtatacactatacaatttttggatgatttaattaagttttaacttcctaaattttttcaaaatttagtttgtattttttaaacttttgtttcattaattaagatttttaaattttttattaaaatttttagttcctcaatttttgtttgacagatcaaagtcctaaatttttaaaaatttcaatttttagtttctcaacaaaaattttaacatattatttttatttatttaatgagattttaaggaataaaaattaattttttttaaaagtttaggactaaaaatcttaatggaaaaaatttgagggacattgaccagtcaaacaaaagtttaggaactaaaaatcttaatagaaaaaaagttaagagaccttgatcagtcaaacaaaagtttagggactaaaaattgaattttaaaaaaatttagggactaaaaacttagttaaccctttcaagattgtatgagttatgtacatgtaaaaaaataaactcttaatgacttacccttaattgtttcttgactctaacgaaagaaaaaaaatgcattaatatgggttcaagacttcaagttttgatcgcacattattacatatatgacctttaacaacattttttgtctgatacttaataaaaatgttgctaaaacctttgacaacatttaaaatatattgtcaaatataaataaatattactaatatgctttcacgatattttatcaaatgttgtgtatagtacatgttgttaaaacctttaggttggggtttaggtttggatcgggtcaaagtggtttgggtttgagtcggagtgggaggaataggagtttgggttggggtcgaagtggaggaaagacattttgggtttgggttagagtaaagggaagagggtcggggtctatagtggtttgggtttagttctaggttggagtaaagggaggtgaggtttgggtcgaagtggaaggaggagggggttgggtttaggtttgggcaggggtggagggaggacaagtttgggtcagggtggagggagaaggtgttgttggtgcatgtaagtcacaaggagactaggagttgaacctggacttgaatttttgttgacgtatacttccactccaagtgcatgtactcctagtcacacttaagagtttgttttcgatatcatccacattaggcgtatcaataatgatagaatctagattagttagggagtggttgcaaatggtcgtataaattttcaaggattaaatttttcaagtacacaaaaacacatgaatgtccattaggcagatacctaagccaatctatgaaacccttaattcaccttaaaaatcgcataagccactatatcagggtaatcaaggtctttctcatattgtaaattgaatgacacattgcaaagatactgaaaagtaccctaaaactttgtggtgcaagggtttattgttaggacatatgatatttttcaaggcatcaatatccctacgcaggtgatatgtaaaatatgtttgcaaaaggcaagtgtaccctacacaaaaatattgtggactcgatagtctagatatcgtgccctagagactagttgtattcttaaataattcgatttgtataaactaaataattttggaatagaaatattacaattagaagcccacaaaatattactcacattctttttccaatccaaaagagttcaatttttgtacacaaagcaaaaggacaccactcccacttctttcccttcctatctataattaaaatgtgaaacttttgacgtggaaaggagcacgactgtgttgagcagaagcatgacaattctcgaaaaataatgacgttgatgatctttttataaaaattggagaacaaccatcccgaggagttttgagggtgttctgaaaagagcacaatcgttctcttcattaaagcgctcttctaggcatgggtgttcaggacttagcatgggtgtgttttggattcaacatgagtgtgcttttttgacccttttttctcaaccccttttatgctgaattttcgcattctatcactctcaccttatctatatcacattttaataaaatcccgtgagttttgcaaataaaatgcattaaagcaacaccaaaacttatgtataaaaccacacaattaccagtttattagcagggtcaatcctgagatttttggtgtcctagataaatcaaaaaaattagatcctcataattattgaaattaataatgttcgccttgaaattttttgttgtagaactcattaataatccattaatagtaagattatttaaagcaacgacaacatgaataattaatattattctaaaattcgttattaacaataacatgactagttaatcgatacaaaatcatttaaagcaaaacaaaattatttaatctactttgtgacatactatattgcaaataaaattttaacatattcacttattcttttgattttaaccctccagtttatcaagggaaagatactctttttaatccggagtttggccaggagataagtaaaacctagccaataattattcctgtcaaggatcgaattcggatactatctgaatgattcaaccttaacttcattacattttcaattatgctaaaagactttatcaaaattgaaaatgttaaaattttatttgcgatatactatgtcacaaggtaaattaattaattttattttactttaaatgattttatactgattattaactattcatattatcgttactttaaataatcttgattataaatgaattattaatgagttttacaataacaaaaaaatcaagatgatttttttaataattataaatacataatttttttttattgcccatgacgtcaaagatgatcccaggatcaaacatgagaattatcatattttagagaatttttaatttttattattttctttttatgtacataatttattcctctttgcattttacaattcaaattcaattaaacagaaacaattcttcatggtcacgttattactaaattataatattatataaaaattaatatttatatagactaaataaaaaatttaataccctctaaaaataagatcctaaacggtcacccagcttgagggtgctcaggtcaggcgaaaggtagcctgtgcacaaaaaagctcaacgagttagttgaataacctgtcaggctggcccatagcccacataaatagcccctgttaagtatatagtttgcatcgaattaaaagtaagctttacttccaaataaatttatatttgtgacaaacttctatattaacaatatttgtagtgagttagttttttttagataaatatctattcgatcttaaaattatgaatcgataataaattgatatttaaaagataaagatttaaatttagttattgaatatataaatagtataatagattagctagtataataaagacacattttttttttcaaaacaaaaagaaaacctaaacaattgagtaaatgcttgaaataaatcattaaatatatccgtgtttcacatttatattttataaataaatatttttgaaatatgtcttatattattagttaaataaatatgatccaatacgaataatttatactaaaattttatttaccgataaaatattatagtttttttaattaaaacaatatcatagaaagatataaaacttttttataatatcacttgtcttttccatttcccttttacatgggctttatacaattcaatcaccgagttgatatcagaaaatagatcagtagggaaacttttttacatggactttatacaatttaatcacccagttgatatcagaaaatagatcagtaggaaaacttttctgcttcccccatatgataatattaaatataaataattaaagaaacagaaaagattacaacaagttgatgatatgatagaggaccctctcctcatctatgtggaataaaaatggctaaatatgcattatttttttaaatatttaataattttagtaaggactgaggagctcccattcaacaagctgggccacactgggagcatgactctgggcctgtggttttggctcaccagcacgattctcttagtagcgataagccacgaaatcagacaacactgccagtgttaacgctagggcatgcaatcttcaaaccaaaacaacaaaaaaataaacgaaaaataagtaataattaaattcagaggaacactattatggatgtgaatttgtgtatgtaaaattgtggatttgtgggacatgtgatgtactacctggcatggataagtctaagactaggcttcattggagaccttgcacgcgaattagccacagtccccctacaaccaacaccattgtaatttagttataatgaaatttatcaccaactataaattttgttataatagatagtagagatttcacattgattgaatattaaaaaaatattgttttgaatcagtgatatggttacaaatattgttttttcatttatggaaattacgaatgatgttaagaatatattctcaaacacattcttttaaatataatttattttattggataaaattgattggaactataaaatcagaaagaaaaattgattaaatagaacatgagacacataagagagtgtgtgttaattagagagtttttctagtgattctctatgatcaaaatagagtacgtgagggaagggggaaaacttgttagttagacataacttaccaactgtggctagcatgtgctttgaaacccaaaattgaattgcatccatgtagaatcttttgttgctcgatctcttagatatgctttagaatttaccagctaggtgggggtgatgatgagaggttgagggtgagtatttatagctaaggagatgagggtaaggttgtaatttgagattcttttatggtcccttggtttgttaatttacaggggggtttctatctgttttattatgacagtgaaaaggttaaacaggaggaggctttgttttggaagacggtgttgctttaggtgaagtgatgagccttgtggattttggtagttgtttaagatacataaagccatgattaagtgtttaatgatagatggaataaaataatatgtcggcaaaaacaatggaggataaaaaaaatatgagatacaataaagttattattgtattatgtaaatattttatgatagaattcattaagtttatattttacatatctagtttaatttattttagagagtacttttataattatctgaaagtgttttggaaaaatattttttaaaactgatttcaaataaaaagaataccaaacaaaaaggagttaacaaattaaagtaaaatataacaaactttaatttatgtcattttttactgttaaatccaaacatattataaattaaatgaatcttcacatgcatatttataatttatttttatgtaattacacatattgtgagtactgtgaatactattataaaaattaactttacacacgtattggtgttaagggtttagaatgtatgattgggtattttattagcgttaagtaaatatacgaattcttaaaaaaaaaatcaaagtaatccttcgggaaaaagataatcaaaatttaattaaaagataaataaagtttgactaaaaattatttttattaataatcaaatttaaatattattttaatatttaattttaacttcaatatattgaatcatttgattcattataaaaatattttattataagactaataaaatattttcatagatgcaaagaatcattatgcgtgtcatattgttgttggctgaattggattcgatatcaacagggtcacctaatataatatattcatattggtataatttattttaatatataatgtcaagcatatataccttaacttttattttgtagtttaatattattcataacgtctaaatttctgttaccaaaatattatattaatccaactcaaaaaaaaaaaaaatgaaatcataattttgttccgaatctgaatccaaatagttagtttaatcaaaatatcaaatcaaaatagggtcaagttactggaccaaaaaaggaaaaaataagaaaaggataaggtcaagttagacccgtccaaactctaccataccaccttatgcttacagttaaccaaaaacacctgcatgaattgcatttcacgccaccattaacatggcctacatcgcatgtacttcaagaaataaataagaatttatattttagcttttataaactttttattatttttagattaaagtagtagttattttaaaataactgttttaaaaattgacacaatgataaaagaataaatataaagtcttccacgtggaaataatagaaatggatcatagcatttcaccccagaaagaaaagaaaaaaggataatgtagaaaggagcaccacaattttgacaagttggtgaagcggtcataacagttattagtagtattttggagctggtaaagccgttaaaaacaatgtattacaaaaaaaatattactattggactggttttaataaaaaaaagaagttgcgttaaactattaatgaggcctacgaatgaatattggaaaagtaaaaatctatttggatgagttttttaaaagtatttttgagagagaaaaaataagaagagaaaagtgagatgaaattcccgattaattaaaatgaactctttaactaatattaattaatttgtaaaagttcttttatataatttttctaaaatatgaaaagacatttacaaattaattaatagattatttattttagtttattcaaaaactcattttatttttgggagttattattagttcccacttgacccctatcatctttcaaaaattccaaaaaatcctttctcataatgcacaatagaaatatactttcattgcactaatgggagggaaaaaaatattgtacaacaaaatcgcaattttattgtatattttttgcaccccattagtacaacaaaaatgtaatttcattgtgtaattgtgaaaaaaatgcacaatcaaattactatttcgttgtacaagtggggattaacaaagaatgaacaataaaagcataatttcattgcacaatatacaacataattattctttcattatacattttttttttgttttttcatacatttttttttgttttttcattgttcgataaatagaaataaattaagtattaattgcatgatttgtaacctaacaaaattacaattcgcctttgtcacaatttatataacatgacaaaatcattgtattacataaattacaacacaacataatcgtaattttattgtgttaaagacattgtaggtggggaagagagggtgccaatattgggagaaaggagacaaataatattttggcatttgtgcattgatagtagggactagaatcaattttggagtttccaatatcaatttccttaaaaatattgtttcctataagtgtttttatagagaaatttatcgaaagagaccgtaaggcctagcccgtgttggatatgagaaggcctctgtacgaagatgggcctattcatattacccaacccaaattgcgttttccgtgctttcttcttcttcttcttcttcttcttcaaccgaaaataaataaataaataaataattcccgctaacacagaagcttcttcctcaatcttcttcttccttctcgtacttccagttaaattttcgcactctcaacttcattttcttaaaccacagtaaaatggaaagccaaaaccaaagttagaagaagtaagaatggaagcaagtaacgaaagacgagtgctacctcgcagaaagcctctctccgatcgcaccaacacttcttctccctccgttgttcccctcaaacctcacaaaaccaaaaccccttcttcttctccttcttccgcaccccctaaatgcaccaccaccattctcgataatgccccaaaccctacctctccttctccatcgctcaaaactccctctccctctctccatggtaattattcattccagcttagcaatgcttcactttgaatatagcatgtttaattactctgtttagttaccgcctataattgtcgttttttttctttcttcttttcttcagagattgttgatgttgaagcttctgagcctattacagtcgtgtacagccgaagacgttcttcaaataaaagaaagaaggataaagggaaggcagtggctgttcctttcactaccgcgcccaatttcaagatctctcatacttggtaatcgctactaattactactattacccttctcttttgcctagtggaagttgtattgagtttaagaaacaatgattgagggagaataggaggagtgattttcgaatttccgtgattgggtaattaaatgctaaacattgtgatagaggggattttaagagaaatgctagtagcgcactcttttaaacacattgtctattattatttgctgaaatttattggaaattataaaattgtgagacctacttctcatttaatgaattttacttatgattctctagtttctactaaattgtaagtaacagtagagttacagtagagtttattagatagtgtgttgctacttaaacatttcacagttcttcaaaggagtttgctaaaagatttgtggactttgctgtttggattggctatatatgtatgaatgcatggaaaagtcttggtcttgtgaagctttcctgaatagattactgattcagagttatccctttatgtttcaatttttttttagtcggtcctgctttgctgttacaatgctttatacccttaacattttatgtttcattcgattctgttttggtatctatgttatagttggatagatccattatgtctcttgtcttgatttacggaattggatttgatttttgctttttattgtctctttcctggaagttctaccatataattattgttgtgtatgaatttgtgatgaaaaaacagcaatacagaggatgagtttgaaggtgtgaacctacccaaggccaaggcaatgacagttcctcgtacaaaggtatattaatttactattgtgttcccaagtttctgtgattttattaggaaactcaaaccccttgactgtagggatattgaattggttattcaacaagaaaatgttcttgttaaaaatatttcaatgagcattttgcgaggattgtttatttactgtttaagatgagtattcctgcctttttagtgggtatgtcaatctctggcatgagtaatcttatgtctgtcatctatacttcaaacaattttatgccaacctcccttgatatctacacagacaattttataatgtctatgaaatttattcacatctaaaatataatgggtattttcactatttgtacgttttgaatttgtgtgaagggtgaatcttgatgcaatggtaagattgccacctggtgatctggtcacgggttatatagcctcaaatacaatgtatccatccattgggatatagtgggaacctttttcactggaccaccatttttatagcatttggaatagttttatagtgggtacaatggaagttgatcacatttcaatcgcagatagttattgtgactcccaactatttagatttcctttgccatcacacgttactcattgtcctaataaaatctttgaaatagttgttgggtggaagtagaataaataattttctggtactttctagctcagacacttctgtttcctcctgcacatgacattttcttttggcagggggcttgcttacaggctatagattctgcatacttcttgtttcatgttcaatcatgtcaaaataaatattttgttagtgtctgatgcatattttctgaattttcagaaacagcgtgctttgtcatctgaaaaagatgagttcaaggatcgccagctgcaagaatttatagaaaaacagaaagcttactttaaagagattgatgaattcgaactggaggttgaatctggtgatgagttggattaggtggaagagatgtaatataactataaatagcagcttgaaatttccatgttattgtaggttgtatagttgagatatcgtgattttcacgatgaagtaactacctcgcagccatctctgacaaaatatattgtaatattctggtgggaacaatcgaagttaaaattttttctgcccaacactgtatcacattaattgtccttagtttttttttcttcttatttctcttgtaaatttcttctcaaagttataattcatttaatttgtgattttaatgcctgctttgttttaggctgatgattctttaaaatccttaccgggcaaatgcaaagagatacaaattttctggatagatagctagatattgtcgttcatttgatgctataagtctgctggttacgttgattgtcgtgcatttgtcaaagtcatgtgcatatatggtatacatataaaactacgtagttttttgatgataaactaggtcgcttgacggttcggggatcaaattattcgacataactttggaggagggaaataaaatttatattaaaaacatactatacatcataacttgctaacgtttaattgactttcccacaattgattctgatctggcccttgcttcctgtgagaggcttgatgttgctcattttgagcatgcccttggcaaagtcttcaaagaatgcagcagcattggtagcatattttcttaccagattgtcagtagaactgccattgaacagctcctgatcggaatggagaagggccttcttactcaccaaattctgaaagtatagattatcaaaattgattggagtttggtggtcaagggcttcgagtgttttgtcatttccacttctggggcacttgctctgcaggaacttccggtaggagggatcaacgttggaatcattgtagatgtgtgctctgaaatttttgcattcagccaggccaatggtatgtgcccctgttattgaaaagatgctgttagtaagttgaagcactttgtgaatatgggaagccaaaattgaattaggatcctgtcatttctttagtacgccagtgtttttacataggcagaggaaaacacaatttagtgcgggaaatggaaggtatcaaacaagaaaaattgtgtttttttnnnnnnnnnnnnnnnnnnnnnnnnnnnnnnnnnnnnnnnnnnnnnnaagaaaaaaaaaaaagaaatgaccaaattcactaaaatattttttcaagcacaacttttgaacagaaaagtggtaatttcttttagcaataaataggttgagaaaaactcaaactgacgagtgatagttttaggtaataaatagataggaataggacaccaccactcttgatcatgacaataatcgggaaaagattttttatttttattttattttttttattttaaaggtaagagtctacgataactcattcaatcaactagttaaatccccttgataaaaggattgttttgttactcacttaacaaccaagacttgagagtactagaatccgttgacatgtagaaacaaataaagacacctagatcaatacgatgggatatttgataatgaatgaatagagtgaaaaagagataacatgagatgaactcaaatagaataatataaagtgaaataaaatgcccttgattatttatattttatgtttaggaagaaatttttatcacattatttaagaagtagattaaacggaataataagaaaagtaataaataattaatcggttcaaatttcatacctcaatggaaagcagatgagtaaacaatgtttttgctggattgcatgaaataaaataattaaaattaagtgaaaagtgagtttttaattatagatatgttcaaaaaaattataataattatgtaaattttaatttgtttaaaatgaaaagtaaaaaatattttagtatttttcttaaaagtgaaaagaattagtttatggaaaaagctctggaaaggccgaatcacaaatttactttctttaagctcaattaaatggactatttatcaatttttatttaatttcagccaccttatttttaataattaaaacattgacgaataatatttcccatttttttgtcattgcatttattcatttttttaatatcacttctattcatttagttaaaatgaaaataaagaacaacaatttcctcactttttttatgagttcatctctcgcaaattctatttaaaagggattatttagtcaaataattaaattactaatgcaagaaaccgcacatgtcatcacaatcactacacatataaaagcacaactttaatttggaagccaaacgtgttaaaaaaagcatttgttttaacttatttttgtggaagtcttctatttttggaaagcatttgttttaactgattcaagacatcttataaattgttatagcacctgaaagagccaccaaatctgtaactgagaggccttgattggcaaaattgttaatcagagcagttagactgaggaaaggcccaggaatgctattattagcatcacttctgcttgctgtagtagaatctcttctccccaaccccacttcccaagaaggtcctcctaactgcaaatgttttacacaaaaagatatatagtaagtgcttaaattcaagggccataataattgataactttgactgggatagaaatagaatcacagaatattagtatagtagtattacataaactacagaatctctagctgacaaagcaagaatatcagcacatgacactactctggggcattctttctccacactggctttaatatcattaatcacgttgaaccctctagctgattggttgttagctgctgctgtttgctccccaatgaagttacttgtatcatccaacaggattgatgcatcacaaccctgaaatatcactatcttaggaaagcaacttcgaagaaattattagatagtttcagaccactacatgtttatagtttcaatcaatctctacgtgacatttattcaaaattttcaatttaaaaaaaaaaaaaactaataatacttaacacttaattacttgtcatataaagattatttgaaccatactgagccagactacctaataatttctcacaacttgcagcctatacaaaaggttacataaagtaaacataaaatgtatgttatattaaactatattattaattatatactaacgtttacaaagcagtcatggaaatgcaatcggagtaaggaagcccctatgcgtgcttctttctgaatggcttcgatcactcctttcttcactataggcaacaagtttgggcaggtgcatgagtaaaagtctgtacatagttctgccccagaagctgtagttgcaccgacgagaacaagcaagaggaagtagtaagaagccattggagctttcgtacagaagacatacccaatcattgcagctatctcttatacagggttggactaaattattattatttttaaaaataagcgaacatgtgtatttatgtatgaggcacaaaatgtgccaagagtcatttgaaaggatatacaccatatcccctgtatactatgtataccaatgagattgtggccgaggttacctaatattaacagtcatagttgtaaatatatgaattacctgtaaaagggcaaaatagtataggatcaatctgctgttggttgaggtggtgcttgatagacataacaggataaaataaaatataagaattttatttgtgtgacataaattaaaaatggaataggataaaatatatgatcaattttcttttaattctattaagatagtggaacaacaaagaataaacaaaaaaaaccttttttttaattgtatgttcttaaggtgtaatttatatttatttttgttaaacaacttttcttaatatcaattagttttaagatgaaatttagtataatattttgtttatgtacatcacctgttatggtaggcgtcaacttgttctaacaaacatatatgggtagggtgtgggaaaatctcaaatcatttttctcaaacatcacttaatgtcaattaatgtttaaatgaaatctaacaagagaaatacatgatctaagtaactcttatatttgtatccttgttgattaagtatctaagtagtcatgcttaattgttaccaacactttaattaaacatgaaatatcaatgaattgaaaaaatatttatctagtgtatctcccatgtgttggttagtcacaactcaataacttatgtatcatacaatcttctatatatccacaccatttccatcaaactttacgaatatttacattatctatatattatggatagataaattctacatatactcattgagcctgattcccattatctccttaatggcatggttatgcattttaatgttattgcatctccataaaaaaaaatcgaaaaccaataaaagcaaacgtaggattctttaattgatattgttggtttatgttatgtatagtcgaataaattattggtgaatggatttttattagtatttgtttatttttttataatactatattaaagctaagggtagagagagttcagctatctgaaaggagtctataaactagtctacatttgacgtagttcagaccatatattttaaaaaataaaataggtcaagatattaattaagtctaaaatattagacttaattgaggtcattcaaaaaaatcttttaggaaagtcgacttatttattttggtgaatacatgaattaaaaaaaaaagtgtaaaggagtgacaaattaaaaagctaaacttcagggcgtgcatcctataacacgagagcaagaacgctatctatgggagtgaaccaagtgttcgatataccagagttcttggatccccgacaaataagttgatctattaaagtaaatatgaataataattttttttatcagcattattatattaaaaaaattataatgtattaagataatatatttatttatccttttaaacatcgaatatgttgacttacatataagttgatttaaaacaagcatataaacaaattatattcaactcgtaaaatattatactctacttattatttcaactcttgtcctatgccttaaatagtagttattttaattttagacttatctaaaagcttcgaatatgcttttaaataagtaagttaacaaactaattaaggcaaactttcaaaaaaagcaggtcaaaattcaataaaaatcgttagtggcggtatcaaactagacttgaactttgatttttttttttttttaaaattctattgtcaattgtnnnnnnnnnnnnnnnnnnnnnnnnnnnnnnnnnnnnnnnnnnnnnnnnnnnnnnnnnnnnnnnnnnnnnnnnnnnnnnnnnnnnnnnnnnnnnnnnnnnnnnnnnnnnnnnnnnnnnnnnnnnnnnnnnnnnnnnnnnnnnnnnnnnnnnnnnnnnnnnnnnnnnnnnnnnnnnnnnnnnnnnnnnnnnnnnnnnnnnnnnnnnnnnnnnnnnnnnnnnnnnnnnnnnnnnnnnnnnnnnnnnnnnnnnnnnnnnnnnnnnnnnnnnnnnnnnnnnnnnnnnnnnnnnnnnnnnnnnnnnnnnnnnnnnnnnnnnnnnnnnnnnnnnnnnnnnnnnnnnnnnnnnnnnnnnnnnnnnnnnnnnnnnnnnnnnnnnnnnnnnnnnnnnnnnnnnnnnnnnnnnattatagaataatattaaaaatattaacttttatctatttcttatatgattagaagtacgtagcgaatgatttcttttcaaaaagtttgacagtctcgatctacttgtatttggggaaaaaaatgttctgtgagaaatcttgagtttttcaaaacttgtgccattgaacaggctttagaggaaattatatatgaaaactattgaaacaattgagagatgaaagtggttaagaacttagttagactttttaatcctattaatcaaaattcgtaaataaataattcatttgaaacattttcatgataaagcaattgttgatatacattgttctggtatataaaaaataatcttatattacttggaaattgaggctaaatgtagtttataaacactcattttccttgagtcaccgagagtctgggacatcttttattgacataacattcttgattactggtttcctctctttagaaaatgtgagtgaacatctgttctggagacttcaaatcgaaacacacaccatatgcatgagagtgtcttttattagatcgtagttgttgtttaattttactactgataaaaaaaatctaagcacacacgtagcgaacaaaatcaataatttacgggtacaattattgcctcgtggcagtgacaatttttagcagtttcgttattccaaaagtgagtaccataattgtttcgccttttctgtgcatggattgctcctgtggggctcaatcactgttgttttgtgggaggactggtcccccgtgataggttcctatgctgtgacagaaattattttacaaaattacgtgtaaaaatatagattgttactttttattttttatatcgacttaaatatatttttaatttttataaattatttttattattttaatttttgtaaatttatttttctaattttaatccatgtgatttggtatttttttttaattttgattcatgtaagtttttttttttttctttgtaagttaatgcttttttaaatttaatcactttaagattttaattttttttcatttataatcttatcgtgtttattatgatcaaaattagaaatatgtaaacttacttgaattaaaaaaaatatatcttacgtgaatcaaaattaaataaacacaaatttaaagatactaaaaatagacaaatttttttacaacaatcaaaactaaaaagataaaaatttatataaacaaaaaatatatttaagctctttatatataatggatttacataaattatttagtaaaatatgaaaaattatgtaaaaattcaataatatatcattaatattttttatatttattaaaatgtgtcatcaatataaaattctttcacatattatcatttaattacaaattatcatattatcattataatagttttactaactttcataaaattactttaaaagcatcattttttatgttattgtgattcatctttttgatatggtcatgtaccaaaaagcatcaccaaataatagtttctaattgttttatattactgaaattttcagtttgattttacatgacaattattgatcatatatattggaaagatgaaccacagtatcaatataaaaaaaaaaaaaaatcaaatgagctaaattagctgtccagctgaattgcggaaatttgttgcgatgattagtcttgaaaccagaatataccctgtggatatatcaaattttatttgaagcagaattaatgcaagatctatggatgacatcatttttgtgcttaatgaccggataattaggctttttgttgcaagaggcttctcatttgtgacaagctgaaaatggaaatcataaattaaggcgaaactatgaaattgtttgacttttaatttcaacgaagtattaaaaaagatatttctaaaattaaaattaagcacgcactgaatttccataataaaatcatgaaaagaaaggtcacaagaaaaggaattacgataacaatgacttttattctcttgaaataatataatactgtatttgaattcagacaattcaggttagatgatatagaatgttaaaatataagttagcatgatttcagataaaaaattatatatttaatttgaattgattataaatctataatcaattttaagctttttttaaagtcaaaagggaacttttatttcaatatcccccacaaaaagtatgagataagatatatactaccaaaaggtctataagtaattttaaattgaaacaattttgggtatgtcttgatcaacatttagtacatgtttaaaactaagtcacatcaatttcgatcaagtctgagacaagtaaatattcatagttaattatgcatcaattgtcaatttcgatgtgaatttttaggtttagctagtgtaagtaatgtcattccaaacacacgattagtgtctctcaacttgagtctatggtgagctaaacatgatttttctattcactatgatgtttggtgttgtgttggaaacatgattttgagttttagattcaagtctctgctattagaagtaacttttgtatcaacactagctttagtgcatgtttgacaatcagttggtgaagcaccaaacagaggttgttcaacgcatcttctcccttacttctgcgtccatttgttggatctccatcatatatagcaggcgctgaagcaaaataaacgtgctctttgtttcacatatacccttaaaagacttaagtcattttggtaattacacactactgaagatcatttttaattgtaatttttaaacaatattatatgttaaaatcattttttaatatttagtatctaaacaaaaattacattattacaaattcacagttatttataatcaattatgtaaaattactttgattcaaaataaattctatggcacatatccaaacattcactttgtataattttgtgttagataaaaaatttatactaaattttattattaatttttttaaagacaattttaccattaacttagaacaacaaaaatacaaacctttatcatattatttcaaaatcaattttaacttacaaccgcttaattacccaaatacacaaaaacaattttgtacaaatttaattatttattataatttttataaactgatttagcatatttattgacttttataaaggtaacatttattcacccactaattttggatttagttgaaatttcttaatcatacaagtagtactactttttgttctctcattcatgtatgaattgcttctgttcttgagcaaaagtagctttctcacaccattttcaatttcaccgacagcatcactagatccactaccttccaaatgacaggaaaaaaaaacattaagactagcgtcactttttttatttaatttatttcctaaacgaaacagaccattaatatcaagaaaacctcaaaagtaaaataagataaaatttaacatctatatatcgaaaaaaagataaaatttaacctctataagttataaatttgaaacatcactcgtatccttaaagtgatttaaatataattttactgtaaataatctttaaattcaattttttttagaaaaaaattccaaattcaaagatttgttgttttttccccctctcttttgttttttagtatttttcctccttaatcaatatgttagttagtgattcacagcttagctcttaagttgcgacatttacaaaaagataagcatcagttcatgactcgataaatcatgagttcgtgacataaataaataaataacgagttttctgtagcaaaatgccaatatgcacagtcaaattgtatctgaggttcgggtgtcagctggggccatgcctttatcgatcatatttttagcttttggaatttggtgcctaattataaaactccataaataaacatacaaaaatcaatcttgaagttgaacgaatgacgtgacgtatgtgaactggttacagtttacactttacatggttgcaatgcaatattaatggtttcattttttttcctgaaaaatatatataatttttttattttgttcatgattaagttctttgtaactaatatttaaattaaatatctgtcttaatttgttcaatgcattcaaaaaaaaattgttcaacgcgaaataagattttataatgaatatcaaattgactttaataaaagcttttttatatataattcaacgattgactagtataaattaaaaatcatgttaatatatatatctatagtatgtttagttaaatatttaatcatgtcattaatcaatgtagttacacccaagatatatttcaatagttttcttttagtttacttaattgtgatacttttacaatccgaatcacaaatgagattacttaaaaaaaaaaggaactaaatgaaagcttcgttgaaacttagtaaaatcttttgccgttgttttttattctatttatgtttttctatttggtaagcgaaactgagatgacccaaagtatcaaactggcctgttataaagcccaacaaggtagcaatgttatacgatttggcaacaaattaagtctggcccaaggatgttttcttttctacctgaatctaactctgaacgagttaattacttgatcaaacaaacattgtctgatacttgatcaaacactgtttaaagtctttaaggccaaatatattttatttgtggatttcttggatgttcaactcgaacataattcaagttttgtatgaagtaatattcacacttcatgcgtagaccgtagtggtaaaagaaggtgttcaatggagagttgaaaatggtgaatccattcatatttggtctcaaccatggctcaacaatgttcataatcccgatgtctcatccaatccaaattctggtaattataatcttagtttctgacttaatgaccataatatttctgtttggagaaatgaagttttggaagcaaatttgtactcttcctctcttgaacacatccgggaaagatcaattaatttggagattttctgcaactggaggatatactgttaaaagctcataccatgccattatggaacaattgctggacaattcacacctcaaggtcgaaggagattgatcaataatttggaaacttgcagtgcctcacaaaatgaaacattttctttggagactcatgcgtaactgccttcaaaccagatcaaatctacgtgagaaacaggttcaatgctcactgaattgtattttctgtcaatcaaatatagaaaataaatgtaatctctttttggcttgtgactatgcaaagctcatttggcaagcagctgacctctggaacatgatagaacaaagatggaataatgctgaatcttttcaagaattcatgataagaacccgtttttgcaccattctttgggctatttggaaatgtagaaacaagaaactttgggaggacaacgaaacaactccatgttgggtcaaaacggatcttcaaatcaaatgcagaagtagaacaaaaatgtaagaggagagagatagagaaaaacacaatcaatatgtttaacgtgggaaaaccttcttaatgtgaaaaaataaaatccacgagacaccaatccaaaatcaaactttcactataacaataatgggttacaaagaatcaaaatacaccaaagtggtggttcacacaacctctccaacaatggtgataatcaaactctctagagtgtttcactaaaactctctctagagatatctcaaatgtaaagcacaagacttgctcaaatgtgctctcaagaatgtcacttgaggcgtcaaattctgacctaattctttcagtcttaagtctaggtcagggtttaggacagcattagaggaggaagcccaatccaacaattctccccctacgacttcaatgcgttggcttcagcatcaacccggcatctgccaacaatccgacattttcaatgtgacggattcagcaatccaacccggcattttcaatgcgacggtcgaatcatcctgagaattccacacattcgtggatatggtcaatcacgctcaatggagactcaggcagtgtgggtggtgggacatcttcatcatgatccactattctatatggtaaatttgtccagcaaaatatgccattatttttaaaaaattatttaaatatgcctacctatgttcattaatttttttaataaacaaccataattaaatattatatagcttagttaaaaaaaattaatatcctaatataacaacattgccatttttattatacataattttattcactattttgtgtgtctgtataaatatattaatatatatattttcatgacttcaaatataatacattaatacattaaaaaattataccatatgaaaagtttataaattataaaactagtttttgtacaacacacatgttactaagctacttaaatataaatattaaggtaagcacattattgatattatatttattgcaaaatcatatttttaatgatattttgcgtatattatgtgtattaatttttaaataatattgtcaaataattttgtaaaataatatatttattgaaattaatatgtttaattgtgatatgcgtatatgtttaattttttataatatatgtttaattttttataatatatttaaaataatcaaattaaaaatataatgtatatataagtacaaattaaacacaagtattaaaaagctaatgtatatattagtaaatttagttatatactgaaaaatatttttttaaatcattatgttcacaaaggatgaaataacaaaattaaagcaattaaaaatatatatatatatatatatatatgagtaaaattaaatacaataaacataatattctgttaatataatattttcataaatatttaaataatttaatacctttcaaattatatttattaactataacatataattaattttaatagtattactatatattatattttttaaataatatatttttatcaattaaataaatataatactcacgcacatatatttttacctactacttcctaaattaatctataattaaaatatgcctatcacttgtcttataacttaacaatcataaaatataactaaatatcctttaacctaatgtttcaaatctcaaacctatatattatttcaaaactaaaactatatgaataatatattacaaaaattaaaatatataatgctaaattacaaaagataaaaaatagaaaaatagtcaaacaaaacttacctgttatactgcatagggagggaggggagtgacactgagagatgggagtcagagtgagagtgagcttcagaatgagagtaagggaatgatggatgaaggaggggaaagatttaaatagtaagccatgtagacgtaatttcctggggtctgcagcgaattcgttcatgcgtgacacgtgtccacaacgattctttttttagattgttgcacctatttcgctagggtcaagcgaaatacgttgtgcgccatgtggactgcccattttgtaccacgtattttgctggcacttgtagtgaaataagtgaccaacaaaatgacgccacatcagctcacgtatttcgctaggccttgaagggaaataggatgcgtgacaatattgtgcatgtggcatttaagaaatttttttaaaaatttgtggcagtactgtcagtgtctccatcattatggggtcaagtgattgaggatgcgaattgggtgtcaaatatacgtgatcaaccatttcttccccagtctctgcaaagcaaagtgttgggttcaccattcttatcttccatttgtcgtccatatatcttgcaagttgcagatgctgcattaattttcaataagctagctggcattgtgttaatattgtgtctctgttactcatttataattctcgctgataatgatttgctaccaactgggagaagaacgaactaactagcacaagcatccaaaaccattggcagcaaaacggggacgaaaacactgcttatgattagattgttcgtttagaacagtaagcggaacatatagatagcactttatggcgatgcatatgtaactcatttgactactacaacaggaaacattagtttatacacatcctcttcttatatatatatatatatatatatatatatatatatattatgtaaatttaccgtgaattaattatactaattaatttgagccctttttttttctgaatgtaacgtgaactacaagaaattcattcaaaataagaaaaacgtattcaaaagagtgctgaaaaatgaattgttctttctgcatgtccccttccatgaggacctggagtttaatggtccttgaattactgatcaaaggataatgacttagaatgacttgtctaatggtatactatgaggcagtgatgtgtagctgactagctaagtgtgtgtatgaatatttaaagagcatcagaaccttgcaaatctagcagtatactatgaggcagtgatgacgaaacttgacacaaggccgaaattccaccttataaacacaccgtgacagcctgacaggccttccttcacaaactgcctataggggttggaaaaaaattggcgacgcattttgccttggcagtaccatgaccgctatgtaacaacactggtctgtggccttgattcacacagcctcaagatttttgggtacaccttgatcgcattacagtcgcatcggccccatttaattactagtgacttaatttcccgaaatgttaaaaattacaacgaaattataactatgatcgcaatttaaaacctcttgctaactagtttctatagtttcaatatgttttcttttagctcttgtacttaaaagcaccttttagtccctacacataccgttttaatcacacaatttcagatctttatacagtcagtaacaccgtttggtcaaccgactctgagacagtaataagcaacaactactggccattgtaatttctgagtcggaatgatgagaaaattcaatgctagctaggaatgagaaatagctaggcgtgtgaagaacgaaataggtcgttgctcttgtaattattataagcaactatccaaagaatttgtggacatgctaaaagtttatcataaggtgtgaatatatatggagatctttatattgtttttttaagtcgatgaataattcttcacagcactaatacattttatggttgaggtgttaattaaggagtcattgatagtgattagtgaacgtgtcgaattaatatatgtgcgccattttagttacatctatcctctacaaccatgctatgacaatgccctcagagtcttttaattagttattctttgacattctcagttaaatattgctgcatgtgtaatgattgatgtctccgttaacacatggctaattaaagccaatcatttaactaaggaaggtatgcggctgttatatttagttgcttagaaatatctaattgttttgaagttcatgttcagaaacaagcctttcatgaagagcaacaatcattttaactgcacacacatagtgtagtacattttattggaaatgtaaaaaaacgaaagtgacgttagacatatttttttattctaataaattttttgcatataataggaagagagataaagaaaaatgaaagttattaatagaatatttaaaatattggatgtgtcaaaatattaccactatgcaagaaaataggaatacatataggtgatttgagtgactgcgtgtgtgtgtatatatatatatatatatggcacccaacacctctttcttaattaacatcacaccattgatctctttctccttttattgcttgcttctttagtatcactctgctctccctataatatacttctaatggaagccaaattagatgatcatacctaagatgcatatggtactgttgacttccgcggccagcctgcgctttcatcgaatactggcaaatggaaggcttgcatttttcttcttggtgaccataataatttctaacctgtttattaagcttttataagaatctgatttgtttgatcatgaacttcactaatattttaaacctttttgaagattacttcaatcttgaagattttgttctctagaaaagaagagaaagaattatactgtgaaccttcttccacataggctaggggttttttattttattttattcccatgcgcgcacgttagttcagctctatttcctggttcttagtttaaactttaaagtctaaaagtacatgtcaacttatgagtcttagtgcttgtgaataggtactatttaatgactgttactgaggagtatggttttgaattgtggtacacaaccgcaattacggttacaacatcaaagtattttgtcactctgtaatcgtatcacgaccgtaattaggtcgcattaactgcaactgcgatttaaaaccatgctaaggagatacaaaatgaaaatatcaaagttccatttcatataacttgatatatgatgcttgagctttacttcttttattagttcaacattgcaggctatgaagcatttgaaaggatggtcttctaaggagttgcttccaacttaatcagttaccttactacccaacttcatgaagatactgttccatctgtgaataactggtcagcatctgtgtggataacaccaattcttggggattacatagcatattcttacttgggtcgcttttggacattcgctctatcatctctcatttatgtcttggtaggctaggatttaattatcacaaacgatctcacatgaaaatgtttggaagacattcaatgtgctaatcaattcaacacctatagagataggaaaaaaatagaaaaaacaaataaaaatgtgatagaaaaaaagagataaaaataaattaaattaatgttagtgatatgtttaaaataaattaagtgtgatctgaatatcattactctgatataatataatagaaaaagagaatttaaaggtgttgatggagtgattgtagtttgtggtgtccaaatatcattgcgatacatatataaacatgtatatgtgtttagcaaagaataatgatacataatcatcttttatttttaaacattttattgatatttcatatttctttttaatttttttcttgtcacatcacaaatcctattatacctatgtcttttaaagttaatgggtgtctatcaacattttctttagcaaaccacttcatgcacgtacttgtgcctctcctcgtcacagggcatgattcttctcactttatgcaccaacggcatctgcaacaaggcttcaaccttacaaatttcttttttttacacggcactgtacactatggcagttggggccggtggaacaaagcccaatatctcaacctttggtgcagaccagtttgatgactttaatcccaaagagaaagagattaaggcctcttttttcaactggtggatgttcacttcttttttaggtgctttggtagccactttaggcttagtctacattcaagagaatttgggatggggtctttgctgtggcatcccaacggttggtcctctattgttccctgtaattttctttacagggactccaatttatcgccacaaagttaattagggcagccaaaagtcctgccagagacctaattcgtgtctcaattgcggccttcaggaaccgaaaattgcaactccctattaacccctcagatctttatgagcaccagcatcaacattacattagtggtggaagaattcatctggctatttcttgttttgaggtacacaatttttcttttatttttggaagaattcatctggctatttcttgttttgaggttggtaggaaggaagtgtttatacttcgcagtctagtaattaagaaaaatataaaatgaaaaaataatgatacacaaacatatatattttttatatatttaattaataaatatttataatttttttcttatttctcttttcatatcatattataatatttattaatttttttcttttatctttcactaggtgtttaatgaaatattgaatcttcatgaatattttttcaaaatgtaaacatattggaacgagcacgttttcataaagaaaattatgcaaacaattaattaaagtgaatgtaattgtggtaggcgacttatttgattgagtgacagttcagttaacatggtgtggtaatgtagttgtagttgtggttgaagtaacaattgactagatgtggccatgataataatgatgatatattagttatgctaatagtgtttgtatctagagataaaatagttgaatgatttgcttttgaaattataaattgaaaattaattaaatatattttctttaaaaaaaacaaggtaaaattattttaaaattaaactaaaaatcaattcaattccattttagttgaataattattttttaaatttgaatttaaaaactcacatccaccctggtccaagtcatccctaaaaattaaaaaattgaaaaataattttaaatttcaaaaagatttcaaaactcatgaaatactagttacctcatcaaacatggcttaagtgcgctttatatattcaggtttttggacaaggctgcaattaaagaaggtagcaataatattggttcctcaagaacaccattaaccgttacccaagtggaaggattcaagcttgtctttggcatggtcctaatatggcttgtcacactgattcctagcacgatatgggcacaaatcaacactctttttgtaaaacaaggtataaccttggaccgaaatcttggtcctaattttcaaattccagcagcttctctcgggagcttcatgagactctctatgcttctctccgtgccaatatatgactgatactctgtgccattcatgcgtcgaaaaactggcaaccctagagggatcacgttgcttcaaaggtttggaattggactttcaatccaaattatggccattgcaattgcttatgtagttgaagttagaagaatgcatgtcataaaagcaaagcacgtagttggtcctaaagacctagtccctatgagtatattgtggatgttgcttcaatgcattctaattgggataaccgatatgttcaatgcaattgggttgctagaatttttctatgaccaatccccagaagacatgagaagtcttggaacaacgttcttcactagtggaatcggcgtgggaacttcttgaacagctttttggtcacgatggttgataagattacaaggagcgagacaaagagttggataggtgacaacctcaacgactgtcaaatggattactattatgggtttctattaaccctatcgattgtcaatttaggtgcatttttttgggtatcaagtagatacatttacaagaaggagaccatgcatgggtgaagagagtctttatgttcaagtgtaaggcaaagtgtgaatgtgaaatatcatatttttcctattttctttatttggaaaatcaaataaattagtattttaattttatttgcttatatttttattaatattttaatatagttgggtggcaattatattgtagttaaattaaaagaatatattaatttgtcgtggtaatatatcatggatcttaataaataaataaaaacgtgtgtgaaaatgaaattactaagctcaaagattagaaatgttgtttgataaaaatgcatgaattaatttttgtgtataaaataattaattaagagttaaattgaataattaggagagtactaaattaaatggtatactaacaaaaaaaaacttaacaataatgacaaaataatttaatgtaattttaatgacagtaacacaagtattagtaataaaaattacaaatagttgcaattttgtcgttaatgttttaatttcttttttttttctagtagtcattttgagagagatattaaaggccacaatttataagttgtacacatgaaggctcaaaaaaagtccaacattaaatatattcacattggaaatgtccaactaaataagtccttatgaatcacatgaagataagctagactaaaaaataattagttattactttcttgattaagttaaatgatcttgggtgtataagttttacaatttctcaataagatccttttcatatatcggaaaaataaaactactacagtataatttatcattatatgttgctaataatttcttttatttattttctctacaatagtgtgtaattgtgaaatttttttaaaaatgaagattaaggatctagagtaaattttaaaaagttactcttaataacttatcctctctctctctctctctctctctctctctctctctctctctctctctctctctctctctctctcnnnnnnnnnnnnnnnnnnnnnnnnnnnnnnnnnnnnnnnnnnnnnnnnnnnnnnnnnnnnnnnnnnnnnnnnnnnnnnnnnnnnnnnnnnnnnnnnnnnnnnnnnnnnnnnnnnnnnnnnnnnnnnnnnnnnnnnnnnnnnnnnnnnnnnnnnnnnnnnnnnnnnnnnnnnnnnnnnnnnnnnnnnnnnnnnnnnnnnnnnnnnnnnnnnnnnnnnnnnnnnnnnnnnnnnnnnnnnnnnnnnnnnnnctctctctatatatatatatatatatatatatatatatatatatatatactcaaattttatataagatttgaaacaatcatatagtaaataggtattcggtctaagccaaatacccattatgctccaataaaatctttgagacatcaaagcacaccctgtaataggactcgacattcaaacatactgaatatatactcgaagaccacaattcctttattctataagattactgctacgagtacctaacactacttgtagtatcagatactcggctaggccgagtacttgaacaccccttggtattccacaatgtcgaatacctgatatcccttatagtatcgagcatttggtttagttgaatacctaataccatagttgtgaaaatcggttcggtcattgacccggtcgagatagtgggtcactgggtcggtgggccagtaattggcctggtttgacctggtctacattaaaaattttaaaattatattatatataaatatataactaacattatttgattaaaaaaaagtatactcaaaattttaaaataacaattgaagtattaaagttgataatagaagtaaagtgtattaataataaaagagaatgtaaataaaaactacttaaattaaaacacaagtttaatttttaattaaaaaatgagcaagaggattataaaaagcgaagaagggagtacatgaagaaaattggcccaaataaatgtaaacctaattaatgatatgtatatatcttcgttgtgcctctcatcttctccatttttgctactgcttattgcagttgcgcttccgcttcatcaactcatcaattttcttctattttcctgcacatgcgcttccgcttcatcagctcatcaattttcttctattttcctgcagttgcgcagcttctccatttcatagtgtttcctcttcctcttccttcgcgttatcgaaggtgaggccgacgcgacgagcagtgcggcggtggttgagttgagtggcgatgacgacgtgcacaacccggtccgagtcctaaaaatcggctgggtctccggttcttcccaaaatcactcgattttctccgaaccaaaccggaccacatgcatgagcagtccgatggccaacctagcccggtcatggcaccgggtcctggttggaccgatccaatcggccgggccgaaccgggttttataactatgcctaataccccttgtagtatgaggtacttggcctagtcgaatacctgctacccctgttaagtacccggtctaactgaggactgaacatgtctcatccgatctttgatgacttatgtagagagattacctagattaatgggtaaggaataattaagtgagagatcagttccctgatgataattatagggacattacctaaaatggtaactttgaaaaagtgttcatagatccaaggtccactaaggtatgcataaataattacataaatatcgagataataacataatttatttgtattcattatcttcatttaatcgtcagagtctctttaacatgtatttcccctttgagcttgacaagtatcatttggagaagaagaattacttaaaaaacataaacaaagaagaaaattacttgcctacccggacaggtacaattcctatagaaatgactgatagatttggtatgaaattaattaattgttatcattaacgaaatataaagtcagtgaggtcattataagttgataaccatctatctatactaccacttgaatcagtaagattatattctaattaattcatcatcaacgtagagaaagataaagcaaaagaaagccgtgaaagagatatttaatcaatttccaaattagccagttcatctgtaaaggcctaaagggcaagagtaattatatctttttacgaatttctttccctccccgagcctatccagcggatcattgtttaaactttgacaattcaaacaatttaatgtgaacccaatcaaatatctatctatctatatatatatatagacataatgcttttgtgatggcatgcttctggcatggtttgttagtggttacgttttgtttggttggagctaccattagcccttggttaatctatattcacattattttgtgaatatggtataactttgggctacatgtatttctgatgatcttgtaaatggttggggcacccatttgtgtccttctttttttattaatataagtttttctgtgctgattaaaaaaaagtagagatcctttgcatcttgtgaactcacgattaggtaaaaataaaatcaacatcttaaggttaaatccatttttatgttgaatgctaacaatgtactaatataatactattttatttaaaccaagtttctagcctcatggcacaaatattgtgtaggaaacgttaccagaaaaacagcgactgtgtgtagttatgtcaaagcaatcgacaatcgaatcttcttatataattagtaaatggtattagttaagctttagcgatggggttataataaaggcttgattatcttaatcaatagctgggtcaggctatatgtataggagattcgttacacttcgtcaaacttaaaatatttcaaaatgaataacaccgctttcattctctaatgatatggtcaagaccaatattctaaacctaaatctcctcctaattttccaaagggcactctgttcgcggccagcatgcaattttctttaatttggaagaggcaccgtaggagggagtgtatgggccatgcatgcgcatggaagtcatctatttcctaccgtaatataaaaggcacaagggaacaaaatgtgacaaagttattccctgatcatccaaaacttattgatttttatcatatttatccttaaagttttagttgaaatatacattttctttcatttaatccacttttataaagagtatcctcaacataaacttaaaagccgcgccatttttttcagcaatttttaatgtgtttggtaggaaagaaagaaatacatgaaaaatagagtagatgaaaattgagaatagaggaacagaataaatgaaaatagttgagaaataaagtaaaaataaaagtatttagtttaaaaaaaattaaaatcaatttttaagataagtaattgattgtgaagaattcatagttaattggttttggaaaactaaggttcgtttgattcattaaaaattattggacataataaatattttttatttcacatttgatttgaaagagtagagaacaacacaaatcaaacaggtaagaataggacaaaatctctaatttttgttattcagaaaattacataataactttttgtcatagatatagaatattaaaagacacatatattcatgtttatatctctttaataattgaaaaatagtaatcaattaacgtaatcaatttaaaaaagacaccaaattattttattctaatctctctctctctctcttatcatttcagtaaattcattaaatttgatatcaattgtattaagataattaacattatgtattttaataaattttatattattttttgtccattatttgtcaaataatatataggataaaaaatcatcttannnnnnnnnnnnnnnnnnnnnnnnnnnnnnnnnnnnnnnnnnnnnnnnnnnnnnnnnnnnnnnnnnnnnnnnnnnnnnnnnnnnnnnnnnnnnnnnnnnnnnnnnnnnnnnnnnnnnnnnnnnnnnnnnnnnnnnnnnnnnnnnnnnnnnnnnnnnnnnnnnnnnnnnnnnnnnnnnnnnnnnnnnnnnnnnnnnnnnnnnnnnnnnnnnnnnnnnnnnnnnnnnnnnnnnnnnnnnnnnnnnnnnnnnnnnnnnnnnnnnnnnnnnnnnnnnnnnnnnnnnnnnnnnnnnnnnnnnnnnnnnnnnnnnnnnnnnnnnnnnnnnnnnnnnnnnnnnnnnnnnnnnnnnnnnnnnnnnnnnnnnnnnnnnnnnnnnnnnnnnnnnnnnnnnnnnnnnnnnnnnnnnnnnnnnnnnnnnnnnnnnnnnnnnnnnnnnnnnnnnnnnnnnnnnnnnnnnnnnnnnnnnnnnnnnnnnnnnnnnnnnnnnnnnnnnnnnnnnnnnnnnnnnnnnnnnnnnnnnnnnnnnnnnnnnnnnnnnnnnnnnnnnnnnnnnnnnnnnnnnnnnnnnnnnnnnnnnnnnnnnnnnnnntggtatttgtatttccaggtaagagtcggagattaaaccattatattgagatatggtattgtgcctcttttgagacccttgagcaatagcataattattcaacaaattatatacttaaaaattatttgaatgtggaacttaggactgtatcagttaatttctctcttaattcattttcaaaaacttggtattttccagctaatcatgatgagctaacttatttaatctaacacatgctattttttaggagtactatcatgccgttgttgttgtttcctattttatggggattaattagccttttcgcgggttaatgtaaatatttaataactttctttaccaactttagtagctagttgaattacatgtacaacctaagtctatttagataagttttttcttaaatatttataagaaaagagaatacaactagtgaaatgatttgaattacactactaaggtaaaataatttgatctcaacttatgacttctatagtttttattattatttaacttcttcaaaacgttgattttagtttgtaaaaaaagttaaatgtattttctttttattttatttttcttattaaatacttattgaaaatggtcctacttcaaacaaggaaatgagtggctgagaaagaaaaaaaactcaatctgcctataccttcaaccactccaggaatttgaacggaggaagagaggggccaggggaaaaatcccttgttcggttgttcctaacaactcaaccctcctttatctttgaccgtcacccattactttctccactatactctagttttaataatctttttgaaacagtgggggaacaattttagtttgcttcgtagtttttatttttatttttattgtttatctccactttttttttaggaaatttattatctccacttcagataaagcagttatcttttgatttttggtttaaattcgttggttatgatcccatgatccattcacaattgatgattataaatcttgctagtctaataatgtatttttgttgatccatcctaagtgctagcttgctataattattatttttcaggtaattaaattggtggattaataaatatcagtataaataaatatcttaaaaaaattaaaggaaaaatctctaaggattaacaccaaaaaatttatagggtgccaatggttagtcatttaatttctcacctctactagaaataacttaaacttttagtgtgtatatatatatatatatatatatatatatatatatatatatattgtgtaagtctgtgctaacattataattattattaatgtatcgtagtctagcaatgtaatgtatgtatggtatatatcaattttctacactactagaagaatcaattaatatataaggcatcattagtataaatttagagtatttatatatatttacaggtttattttcatcaaacaaaatttatattaacaaagacaagcttgaaaaaccaacaagataattaatgaactaatattttttgtggtgagtaccaatatgtcattatgttttcaataaattatattatttttctttataattactactatttccctaacattagggtgcggcgctctgccattgttcattataaagttgtttttaatttaattttaaacatgtaatgtgttgttnnnnnnnnnnnnnnnnnnnnnnnnnnnnnnnnnnnnnnnttctttgttaaattaaaaaaagttgttgaacaaagtttataatttgagggttttaattattaatttttttgttgtggtttctttctccacagtacaaattttatcttccaaagaataatatagtttccattacgccatatttgtttcctattttttatgaataaaaagaggattttgtttatgaaagtatactagaggtacttcaacccggccagcatctagagggaaccacctattacattaagtaatacaataacgagatccttcaattttacggtctatctaggattcattttaaataaaatatcatttttttatcagcaaatattcattgttagaatgttaattttattaacagaaaaaaattgaatccaccatctttctcttatttcctctccattaaccatccaactcatattaaatctccaaaatttcatttctttgaatttatattgaccgctgtgtcaccgactaaattgatctccgaacactttccaagctgttggcgcctttgcatgtaatatatataacttgtataatgtggttcacagtgtataagtctacaagagaagaagaataactaaagccactgcatatataataagtataatgtggttcaaaatgtaaaagagaagaataaataagccactgcaagaataagttaaggatcacgcgcgccttatcaaacaattttttggtacatgtaaaccctaatcgtcaaaaagagggaggtacatatcattctcacgtttttttttttttttattgttccaatattccttattaaagatgaattcctctttgatattaatgcatacatcatacattatataatataatgtgtatacatgattaaatcgattcaggtatataattcaaatttccttcacgctttaggtgtttattttggaatctttagattaaatcagcagtcgaagaagcttcgcatttttggctgccaagttgtatcgattgcacgaaaatatcacacatcaaattgtgggtaacagtgtaacatcatataattataatatgggaccctgaaaaaaaaaaaagtttactaactactttgccaacactgacaaaatcatggctagccggcgcaagtcactactggttcaaagaaaaacgaagcaggtttatgaattgattaatcaaattacaaaccaaaagtaaacaactccatgcattgacaacttctttgctagttctgcgtgttaggttaggtaacggaagagagacaaagcaccttgagatttaatctcacattaactaattaaccttgcgagtggactagtggccatataaatatgtgacatatgcacgcacttacgaaacacatattctcatcacatagagttaattacttacttggagggttttagagaaatggcttcgtcttgttctagctttatgatcactttggcccttttggtcctcgtgttggggactaatactagtagtgccaatgccaatccaacacttcacacaaacttctactacagttcttgcccaaaactctttgacactgtgaaacgcacagtggaatcggccatatcaaaggagacccgcatgggtgcttctctcctacgtttgttcttccacgattgctttgttaatgtacgtaatttttttaacatttcttaattaaacactcttctttctttcaattctgtttagtcctagaagttaacattttaaattttgccttcttgtttctttccccaacattttttactttacatttgatttgagttagatacgttatggggtcagtttgtttaaatttattttttgaaataagtatttattttaataaaataagtcatttttatttatttttttatgtttgtttaaattattcttcctttaaaaaattaatttttattcattttaagaaacaaatctcatctgtttccgaaaataatactttttttaaattatttttttaaatttaatcaaactcacctctaactaactgattttacataaaaacaaacttttgtagctagtttttgcaattacattttgtacaactcttgtactaagttactaaagtaaccccatttattatagttcatatcaatggtggttattcatgatcagtgtaatttatgtccaatagtaattttacttttgttcaactttgttgatacatatatataaagattggataaataaatattatatatgttgcaggggtgtgatgggtcgattttacttgatgacacatcaagcttcaccggagagaagaacgcgggacctaacaggaattctgcccgtggatttgaagtgatcgaccaaatcaaagcagctgtggagaaagtgtgtccgggtgtggtttcttgcgctgacattcttgccatcgctgccagagactctgttgagatcgtaagcaattatttatttgaatgtcattgcatatagtttaatacttttttggggtacatatatagtttaatactttaatcatgcatatatatgtatatattttaaaaatcagagtatctgcatggcaattatttgctgtataaggaaggagaagaaaagaaaaagaatgtaaaaaatgtctaagatattcctgataaataattttatataagacaaatcctttttgaaaagacttccacactaacctcgacaaatgtgattaaaatttcagttttctatttgtttctctatcacttggagaaaacagttattgtcattttcattcttaatttgccttttttttttcttccattttcacaccaatctaaacaaaggaaaatttagcttgcgcgtttcctttgtacatgaatcaatctccacttctccattctgcacacacatcacaaacatatgcaagtatacgtaaactgaatttttaatttgttgaatttgatcagcttggaggcccaacttgggatgtgaaacttggaagaagagactctaggacggcaagccaatctgctgccaacaatggcatcccaagacccaattcaaacctcaaccaacttatttccagatttaacactctcggattttccactaaagacttggttgcactatctggtattattatacaagagtctaatatcatgctctcttaacacattaattttaacacactgtgaatatgattaaaaattacaaaatgagttcctcttggtactttttaattaacttgttaccatagcaacaatcatttactctttttttatttttaatttcattccattgcatattctagggggtcacacaattggacaagcaaggtgcacaacctttagagcccgaatctacaacgagaccaacatagatagctcttttgcccgcatgagacaatctaggtgtccccgagccacagggtcaggggacaacaaccttgcacccattgactttgccactcccactttctttgacaaccactacttcaagaacctcattcagaagaagggtctcatccattccgaccaagaactcttcaatggtggttccactgactccatagtgcttacctacagcaccaacccggcctcctttttcgccgatttctccgccgccatgatcaggatgggagacattagtcccctcactggctccctcggagaaataagggagaactgcaggagggtcaactaattgaattcttaagagagctacacataatttggatatcaatgcatgtgtgtgtaataagttgttaaacgagagttttgatttcatttctatgttgtgactttgtgtgctaccaagtgtacgtacctgcattgttctatttcaattcgttaatttaatttgcttctaagtggtgatgttgaagatgaaggccttcgctgtacaagttcctttctgacttaatttccttttacaattataattaattattattacactagctcccatttttatgttattttttgctttttatgtcaatttaatttctagcttacttttcatatttgttaccaaacttttattctgacgtacgcaaataattcatgtgaaattccatttttaacatctcatctaattcttttagtagctttttcaatgactcttttcatctacgaatgacaaattatgaaatgtgaactgaaatcacgacatctcaaacattttttagggtctaattgccagctaattaatgttctttgttgaggatagtcctcattgcttactgtcaaaatgtccaggctaaatataatactcctggatttatatataagtaaaaaatattgttagatttaaatataaataaatttaactaattttatcttatttagtgctattatttttaaaatatcattcttttaattctaattctattattaatgattcatcttataataaattttaatgaaacacattttaaaaataactatatttttaacttgaaattaagaaaattaaatgattttaactaattttttaattagtgtgaaattaattatttttacttatatgagtttagaggaaatacatgattagaaagttatatgaggcacgaaataaaaggcatttaggtgaaggaactagctattgattttactattattttattaagtttggctaatcaatatttttaggatattagttaagaaattaatataagaatctaaggagtaatgacaatgaatcgcgtcacctaaccagatagatttttccctactcttacttcaaaccatatcgatctaaaagaacaagtaccatgtattctaaacgtcgttgtcttaatttttgttatgtcataacactttcctatttgagctaatccattctatttttgtcgcttcacctccttctcaaaagcttttcatgacttcgtttattatttaggtgtttgtttccaatatttttctagttttaattggcactaaacatacaatttggtgcctcgttaaaacattgaactttaaattaattttcacaacaaagaaatatactccgatcatctcttttgtccgcactgtcaatataagcaataattttttttcacaatcaaatacacgagattgatatttattggatcattgcacgtatttttttttctcttgatttgtttccggaaattactttctgcacgtctctaattgcttcctgtacctattctgaaatgtaaaattacatttcggaatagtcaatgtaaaaatttatcttctgataagattatttcaaaatatatttttacattttcaaaatagatgttccagaagttcaaaaaggtacgtacaggaaaaaacattaacaattatctttgttttgggtcaatggagcaagtgctcatttgatatctaagaaccgaaaaggaaattgatattggccctccaaaattgtttttgggctttacctgcaaataccaaaatgtctttttgtttctttcctcccatattggcatccatctatcctttcaggcaaaccaaataatcacgtttttaaggtgttatagttattttactaaattgtgacaaaaagaaatcatgattctggctagccgtcactcccattcaggcacagctgggatagactgaatcaggtagcagttactttctataataatttttgcattagaataatactttcgttgtgcttttttttttttcagaaaaaaatgtacaacacaaatttgatttcgttgtacattgtgaatgaactcatatttctatatactttcttaattgactattgcttactcaatgaaatcataattacattaaacactttttttatataccaaactatacaatgaaaatatatttatgttgaactaatgagaatgagaaaaaagagtataatagaatcataattacattatatataattggaattgcgatttcattgtataatatttttcatatcccaataatatagtgaaagtgtgctttcattgggcattatgagaaatgacatttttagattttgagaatcttggtagggcccatagcaacccacaaccaaagatatcaatacgcgcattttgaccattggacaatgcatgtttggagagtatgattaaacatatatgagtgggcctgagttcatagatacccatattttggttctatttgggctttcttcagtccaaatttttggtttttgtcgttgagtatttgttaggattaattacgaaacaaaatgcattatgattttgtttttaagcgaaacaagattaatttgattaatcctatcatgatgttatcttcgtctttagcttttgaggggaattagatgctctctcctgaagcctttctatcataatgtttttgagagtcgttaaattcatgggtaaattatatttttaagtttcttattttttgtcaaaattgattttgatttgaaaaccataatttttatgctcatattttttataattaataaattttatttctctttatggaatttaagatattagggtgagaaacaaaattttgtcaattataaaatatatgaagataatgaccatttttaaagtataagaactaaagtcgattttagaaggaaatcgagagatgtaaaatacttttttttctaaatttatttatttagggctttgtggtcagatccaattcttatttgacccaaaaagcataataagttagtaacagttagatacagatgcatttgatgtaaattaaaaaacaacacaaataaaataaagcaagcagtaagtgattgagataggtgaaaattttaaacgaacaaaataacatcttgagtaacttggtcctctctctcatacaccagtcaattcctaggaaaaggaagggatttggcaaaaatggaggattagattggaaatgcataattgtgaaactcggtttggttattgatccggttgagatagtgagtcaacagtttaatcggtgaatcaataatagacctgatttgatccagtatatattaaaaattcaaaattatatatgtatctataatatataagaatataacgaatattatttgagtaagaaaagtttattcatactctaaaatccaaaataacaattaatgataatccaaaatctaaatttaaaaaaaaaatccatttttttaaattcaaattgtttttaaaaaaatttataaaatcgacagccgagtttgactgaatctctttggattaactgcataactgatccgaataggtcatcggatccaaatccaatcgaccggactagatgggatatcacaacactgaggaaaggcctatcaataaaaaaggcatcagtttaggataatgatagtccaataaaagaattctttttatataaaaaaaaaatcgaattaagatagagtcccaatattacttctttagttttgtttttattgtggaaacgggccgaagtgatgataaaatagtggagaaggaccttgagatcacacagaactcatacaatgttagaagttcaagccaataatatatcaaacttaaaaagcgtgttgtgcatgaatttttaaagggaagtataagctagcttaaattgaataaaaatttcaagctgtatgtacccaaaacagaattatctcatgttcaaattccaaatttactcaccttgcgtcatgttgtgttttgctagctgtagttattttttaacttcccttctgtatcaccaaaaataaaataaaatagaactgtactcatctctaattattattttgatatggtagttataactccaattagacatttaggcgcatgtataaattggccacttgaatatctagatttgctataattaactaattagaagattaactatactcaagtatattatattaaaaaaaaaaaggcttctaatttaaagcatatacaatctcaacctaaatcatgagataggaaattattatttccaacacatttaaaccccacacacaataaccaaccaaacaactacattttcaaagattttccacaatatgtaaattaaccgtgtagaaaattaagtccgaattatgttacctccacaaactagactgctccatggctcacaattgcattctttatgtttccaaagggatagaagcctctaaaaccatttgaagctttgtgtttgagaaaagagcgaacagttgtagagcgtgagaaagagatgcttccttgatctgtgtccctcaaggaatatgagtatgttggataaaccaatgaccatgatgaggatgaggatgaggaagatgagcgagatgatgttggtgacacatgagcctttcttgaccctataaactttggcataaaacatgaaaatatattggcctttgagtttcttctcttgtttttggacttcaaattggaacaatatgaaggtgggggtgtaaggggtggcagagaagtctcagaagaagggtgttttggggtgccaggttgtgcctcccacatgaaaggaactgcaattgatgtttctccataatagaagatccttgaagaagagttagccatggaggtttccttggacattagtcttgagaagaacctatcatcctcttttattctgaaggacttctcaattgagacatgattggcagcaccatcgttgagcattttggatattgaagtctatgattatttttttttatctcaactacgatctctataatatgcctcatacaacaaggtgtgtagtacactcttataattgctatctagactttagcattgttttaggacttccccgtacttaattctcttaagagttaaaacgaataaatataataaaggttgcatgttcttctaaaattactgaagaattgggttacttcgaatgggaattgatttaagcatagggatttaatcaaggagggcccgggctgttcgatcaatttaataattgggattttttggagggcaccaatttagttgtggcgagatttaatgcatgatatagatagttggtaattgaactatgaaattgaatgggttattagtggcagttgctcaattatttatggaagaatctggaccattgactaaagtagcgaaggtagttcctttataaacaattggtgctcagaaacggttgaggccagggaaggggaatttggttacgggggaacactgtaataaatgaaaacatgtcgtgatcatgaatgagaaaggagatttttgtagatatatatattacatactagtactgtataattgctttcctaaataaagagttattacctacctaattgaaataccatatgctagaaatctaatactcattcattattcgtgcacaatttaagtaacatcgatcaacagggttagtgtgaaaggtctcaaagtccattttcaacttgggaacatgagaagttctacatgatcaaggaatcgaattacatggcatactaataaggttggatccttaaaagagattaattaatttctcataatgtaccgaattagggtttgaattttttacaggagagatacctatattttatgcataaaagattgtctttaaaggaggatatttatgaagaagaaaaaagaaaaagaaaaacgaacccaatgacatcaaggacaccaaaattaatcaattcatgccacgtgaattattatctgattggcaacgtttatctcttctaaccaaataaatgaataaataaacccatctaattatctgttgctagtacaatttgttaggtatagtttgagaggcctgcattttgcacatgatcttctcctaccaaactttattttgtacccaagcttggatatattggatgctgaaagttcatcctcattaaatagcaggaagaaattaatgaatacgttgacctactcgggcatcgcggatagagacatatcagacagtacgtaacagtgtcaagggtattagcattatttattagccatgaaatgtcacatttgggatgagctgtgcgatcagaaaagtcctatgctttttcattggagaattgcacccacatgtggataccgttaactggatctttcctactcgttttgctcagtcttaagttctctcaacaaatttgattatttgatcaacccacccataccagcatcttttaaaaatggagtctaatttaagataaatatttctgcaccagatgaaaatttgttcattatcaaccatgcacctcactaattagatatgctgtgcgacgtgtaataaaataattaaaaaatggcccattaccataaagagaaattaccattatatatcacagcggtgaattatcaacagcatgcaggaccatgcatgcaatggtccagtactggaaaaagaatttgatgcaggagtttccgaaatctactgtgagtaagatacattgaatggtcaaataataacatattagacgacatcaagctaagcattaattatgtatctattaggacttaaatgtgttgttcactaaatctgaaagttatgattaattgacactgctccactcaaggatgccatgttgagatgcggaatatttacgttaggacctcttaatcatgtgtttctttctatatatattgcactttaaataacagaattcacttgttatattactgccattgctatgctgaggcggcagattcgttacgctccatgtgggtgctaaacaacttcattctgatatgaaatttgcttttgatttgttcatttatcacgaagaatgatctgaattagacattgcaacagaaaaagctgggattaggtttggagatattgaaaaaataagtatcgtatttgagagaataaattatccaagtatcacatttaacttttaaatataatattaattattttttttctatcaatatccctaataaatattattttaattttgattataatattaatattattctcttttaaaaggttagttttataaaaatatcaatctcttacatctatttattaatttttttatatgtgagatcaagaaaattaatgtggctagaacctactgttattctttttttaattaattcaatttattgatatatttttaaataaattatatatatatatatataaagatatgaaaaaatcttaaaaataaaaaaaaaatgaaaagctaaatcgtataaaaatatgttattacaactttattatttgactttattataattaaattattaattattacaataattaatttgtatatttggtaataatgaaaactctctgtatgagtaggaaagagtataaaaaaaagtctatttgtgtgtgcgtgacaaagaaagtataaaaacaaaattacatttatgtgtttgtaattgatgtgtaacattttataccatataggtttgtatgcattttgggtttattagtagttttatcattgttttcttagtttccctagtttaggtacttggaactcttgaggtgtatttttatatgtttgagggaggtttggccttggaacttaaggatctaggcttggagtgattcagaactaagagaaggacaattgggagcttggaaacttgaagaaaattggaggaatgacaaccaaaaggtgccacacccaaggtgtggcaagcatcatatcagaaagattacattggcaaccataacccacaacggctacggagtgagaatttccacggtcatggcatgctctaagacaacatgacattggttcaatattattacgatataatgagttgtaggtatcagaacaacgggagactaattcctaaattttaagcacaaaactatttacaaccttaatgacgaatttcatgtcttgattgtgattttggtcatgcaagtgaaacctgctacaacactctatttcgcatttggtttttgtattataattgtaatgggccttgaaccctttttggaccttaagtttgatagatattttagagcttgctttagtaattaagagtctccaactttaatcctagggaagaagtgacaacacaatgatcaagattgaaaataattcatatttgtgacttctctttaatttaatataattgagttctttctttaatttcaaattgattattttctcacttttgatattattaatttgaattccttttagaaaattgaattttgggttaggatatgtagttgcaaatcatttgttcttaatttagggataaaaatcttgaatatgtgatctgtatatgagttcttgaatttaaagtttattatgaattcaacttgtgtaagaaattagagttttggtcaaagataagactataagaggattctttatcatagggttgagattaatattaatctagttgtgtaaacataaatgtcaattgcctaagattaaaaaaattctaaattaattaagttgtattggagaagattaaaaaagtttcaagacaaatgctaatgatatattctctaatacattattggccaaaattaaataataaaatctattaaaaactatgaattttggtgaatttcataatacaagtattaataatagactctttctatcacaacaaaatcttttctacatgcatgaccaaaaaattaaactcctctcaacatacttaattaaggagttcaattatccttgccttttgtttttaaagacacgagtagttaataattttcccctttttttatttctttcttccctcttgtgtaaacaaaagaaagaagagacacgaatagcttattttattagtgtacacaatgctcgaataacattattcatttattctaaagtttaaggattcattaatcttcattaaataattttcgttctttttctttttgcttgaggcggcactctggcaattggcaaaggttgtaaagatcattgcagacccacccagccgtctccagacagcggcacgcagtaatacgtcgtcgtttccatgcataaaaatcgaaaacctaaaaaaatggttttgccttttttccctgaccactaatcacgccccaaatcatgacaaatcttttttttttttatttttttaatcatactattgatataatcatataaagttatgtttatcaaagacattaacagatcttcatcataatcataaatacagataaatgcattttttataataaaattaatttcatatttaaaaatcaattaaaatttgaattttaataatttaattaaaaaacagaaatactgaaaaactatatctgtgagagtgaagtcaaatacgtcgctacttattgtgtgaaccattttgggcaaatcacgacaaatcttacagaaaccacaatttcaccctcaccaaaaccatctgacgtggcaccacctcattggccacacttaaaaacacgtaaccacaacctttgacttttctccctcaccaaccaaccacgccatagcccacaccgtaactccacgtcaccatccccaccctatcatccacccccagaagcgctttccgccaccgctatcccccttttctttttttctcttttctgctttcccctttcgctcgtcgtgtggccccgcgacaccatcatcacgcacccttcctccttccttcatcctcggtattgcaataaatcacacaaatgggtgcttcaaaaaagtcaaagctcgaacctttatgttgctttagctctcgatgcttctctgaaacccgcgttcgcgtttctctttgcgccaatggccgagtcgtccccgccagaaacaccggaaccgaaaccccagttcggtaccggaaccgggtcgggtcaaaacctggaaatgaggagagtgggttcgagagctgaaattgatacttcgccgccgtttgggtccgtcaaggaagcggtgacccgttttgaaaaaaccggaccttgtatacctcttttcaattttggagaggcttatgtaaattttcatctctctgtgttttgtttctaattaattgttcaatttttaagttatgaatgtgtttcgtgtttctagtgttatctattatttaccttttacttgataattggttagatacatacaaacgttgaataaaaatgaattttcaagtaattgagcaatgccgcaattctgagaaggaacttgattactgagcggctttatttttaaaaaaagaaatatttttgcataagagctgcaaaaatgtttccttttctgagcctctcagactctccttgcattcagttcaaacatatgtagctcttgatttgtgaaattatgcccctgtggtgatttactctctgatgttgaagattgtttgttaacagaaaagtgctgaagactttgacataaagagagtggaggaggaagcggcgaagttggaaaaggatttgatagtgaaagaactcgaaacacttgacgtgcttgaagaactgggagctaccaaagcaattttggaggaattaaagcagcagctacaatcagaagcgttgaataattttgcaactccgggtgggaattcatgtgaacaggttggagctgctgttcaaaactgtttgaatggtatcaataatgaagaccagtcgttgcaatgtctgagtccgtgtgctacttcatcccctgatatgttcatgatggagttaagacaagctaaaataagccttggtaaaactataagtgatctcggggtgatacagtcttctattgaagctttgaataagaagatgaagaaggagaggctttttgttgagaggacacgtgagaagcttgcatcgaagtttgcaactgtatctgctcaagaagtggccaagaaagaaacaaggtttaatcctcctgaagctactgtaggaacaggttgcacttgtcattatcccctaaatgttgcgaggagtttcaaatttgatactggacagtgcaatctaatgagtgaaacaagaagctctgaagtttcaaggccattgcctgagtttggagagaatggatttagtatcaagactgctgagatgaggtggtttgcagctaagaagatggaagaagctgcaatggcagcagaagccgttgctcttgccgaaattgaggctctatgtagccccgagatatcatcggaattttctcctccacaacatcagaaagtgccatttgccttaggggagcgctctcctctgcaccccgtagttcaaattcctcaacagtcaaccttggagaaggtcatagattccaagtcccaagttgataaaataggttcttctaaactgagtattttgaaaatattggaggaagcaatagaagaagttacacgcagcaaacaagtcttaactgaggcattaaacagtgttgaaagtgcaaacagaaagcaacatgctgctgaagaggcacttcggagatggattcctcaggatgatctaagaggtccgccagtgtacaactatattaagcccaagaagttcaatcaagttggaaatggtcaagattctcctctaccagatttaaccaggtcgattacagtgaacaatgatcagaagccgatcttaaagtcttcagtttcaatgagagatgtacttagcaaaaagcaagttcctgaagaatatacaactaaggagatggaagagcactctgaaagaaaggtagcattgagtcaaatgcttcgagcattgaggcaggatcaaactctgcctacaataccagagaaagatgggagcaatcaaagacagttcatagcacagaggaaaaagtttggattcatccaaatatcactccccttgggaaagcgaagtaagaaaaaggcatgaatttagtcctattgcctatgcatggatcaatttccacaattcatgcatcagtgtcttgccattctttattgattcttatgttttgtctgcttttttgttaagtcatacagaatttatgactgattttgtaaaatacttatctagtgagataaggctattgttgtgattgtttggttttgtaaacttagtttttcctgtgtgattgctcactttatgcaactggcttagctttaacgggactagtagattttactgttgtgatatatatatatatatatatatatatatatatatatagtcacttacaatacactacacatgtcttgtattatcgggtaattttcaaggttctaccgttgacacggcgatggcgaaagtgagtgctctgttgcaaacaattggatttggttgttgatttcccttatctttcatttggccccaacaaccatttccacacccaaactttccaactccaaacatgtccatgttccgcttcatctccacaattgatgcagcatacgcggtaaaactggtcaacaactcgttgattctagaaaatattgagaggttgatgcacgaggaaacctcactacttcatttcattccaatctgctaagaatacatagaattagtccatatataggcaaagtaaacctaaataaggattaatcatcctaatttttctaattaaataaggatcatatctttctaattttcctaattagataaggattatatcttcccaattttccaaaattagaaacaacaaaatgtagaaaattcttaaaataaaacaataaatattcctagaattacataaaagatgtcattttaacccccaaagggatttggcaaaaatcttgtggcatgctctacatcatacgtaaagggcaaccttctcctatcacaatatcaaggacatcagatgtttggctgagttcggctattaactcattgtagaagcaacaaaataccatacataaggttttcaaatgaaagaactgaattgcctccattaaaaaatatttttagcttagttctgaaaattccgtcatacattgaaaattttaaaattttctattaaaatatattagattttaagttcatattaatttatttttgtttacgtataaatattttatattaaaatttaaattaacataaaattatcatgtaattattttttattttttggagagagaaaaaccccaacttgcacaaatcttctctgcacaaatccttcacagactgatgcatgtttcggatctacttcggactgtgaagttgtaaagataaaatttgtgagtatctttattcattttcttccaatccacatcatcaactatcctagctaatgagcttatcacacatactacatgttgtttataaaatataaccacacaactactcgaatttgttagtggcgaaaatgatatcaagtatatgattttacaagatgaaggattgagattcaatgcaaagttaaggacacagacaaattgtcgccaaactattatctcaaaatgatattatttagttgtaaaatattattaaacaataagagtttattttggtacatatttgctattggtaagattttgataattggtacaagcaaaggtcgaaggcatcaaatcattaacctgagcaaaatctgtcatctcaaatgcctatatctcaagaaagatagctcacttcaacccaaagagatatctttgccaaagagattgctgattccctttccaggatcactttgttttacaatagactccccaaccaatatctacaaaaaagaaaagagtaaaataatgagtctgataagagtaaaataatgtgaaacacctgttgattgttggtttactataagtgttggaaaatttgctaaatatgatcaacatgtaacaaatgttagatagttgtcataacctgagtaatccccttatctaacgaaattcaaccgttcttttactcaaactattattaaaattgcaataaacatgattgcaaggatatggtagcatatgatgagtaatttggctgacaccactatattttgtataatattttagtatctccaaaaaatcctgttagtaccttggttgcttttaaattttgttaaaaccgcatggccatgtcagattttatgtgaccgactcaaatacaagggatttagaattgtcattggagctgcttaggattaggaaaaaattgagtatttcaattaccatttaccaggtgtttacttagagtagaaatgaaatttaaagacttacagctttaacaccagcttcttgaacataggcaatatcgtcgggggtgaagagaccagattccccaaccatctaaacaaaccatataatcatcagcatgatgttgatattcaaaataaattaatatttctttcaagtagctctaaacaaaggaaaacccacatacaattatgcctctctcgtggattattttgcctcgctctccttcaagaagcttctttgtgatgctgatatccaactcaaatgtttctgcaatccccaaaaagaaaagccacaattgatgagtcatgagtcatgagtcaaatcctcaagtttaaatattcagacattggcacaaaacgtagaaaattattaatattctcaaactcgtgtgcgcatgagataggaggaaaaaaaggcccttaattgcactcttggtccctttactttggattatgcacaattttgctcccttaaatttttccagccaattaagtccttctaggagttatatcaatttccttacctaaaacccttaaattctaattttctagttgaaatattcacaaattgaattaattaatttttttaaaactttcttcaaatcaagataaaacattaaatttcacccaacatttaaaaaaaaaaaatcatttccccctctatttgaaccctaatttcacatcctacaaaatcctttaaagttcaactaaattttttacttttaaatatttaaaaatattttatattctaaatccatcctaaacccacaagtatttagaaaaatgagaatttgaaggtttttagatataagaaaattgacagatggacaaaatttgcttgattttaaaaatagaggaacttaatttgcttaaaaataacttcggggattaaaatcccacaaatttcaaactaaaaagaccaaatgtacaattaagcaaaaaaaaaatgttgctgagggaagcaatagcataaagtataacaaataaaaataattgtattacttcaaagttttatgagttctaagagattgttgtaataaggtacaaataggatttgagaattaatgaagaaactggaatatacagaaaatgaaagcaaaaatagaaataaaaggcacataaaattggagacgtactggaaaacatcataaagaaaaaagtggaaggggagacagagagaggagtgacaagacataccaagattacggttgttaatgccaataagctctatgccctctattgcaagaacacgatcaaattccctctcatcatgaacctgtgagtaaggaacataaaatgtaaaaaaaatctcatgttcatcaggaaataaaagactctgcatggtagacctagaattatggtttaagcacaaataaggaacataacatagagattcgtctagtcaatctaaagattctatacttttaaatctaacacacttcaattcttgctttcatgtacagaatcattatattaaagaggttctcagtttgtacattgcactattcaaaactcaaagtgacccactttaggaccaagtttacacaaaataggataaactcaaaacacagcgcaggactagattcatattaaacatcagatatcagtaaacttaaaaagatttgttaatgttgaagttgaatgtcattcaaatttaggaaacaaataaaaaaagcaccaatggtacctcaacaagtgcagtcattccgagtaatttgcatatcttaatcatgtatttgatgtcaagatcaggcaaaacagcagcaattaaaaggactgcatctgcacctttagttcgagcatagtagagttgccatgcatctatgatgaattctttgcacaacaaagggcactgcatattcacaaaacatttgatggtataataaatccaatatcagggactatgcaattcacaaaacaaacctttatgccagcctttcttattgcctcaagattttcaaagcttccctggaccaatatcaagttagagttaattttgttgcaatatcacctagtactgaatcagccaaatattatctagcagtacacatgtaacaaattccaggattgttggtttaccttaaaatacttttcatctgtcaaaacacttagacatgctgctccacctttctcataagccttagcaatttcaacctatcacagaaacctctaaaattgtggcttataccatgaagagaagaaaaatacaaactaacaacagtgtcaaataagttgcttgaagggcacgatatattgactgatacaacaaaactaagagaccaagatactcaatgagaaaacataacatattcctgactgatacaataaattcagagcaggtccttatttacagaagataaaatttaaaaactataggattgacttcataaatgcaataattgtaaaagcgaacagagagcctatgatagatttgagatgaagtaatttatgttgatgggcatgcatctcaaaggggtagaaaattaattcaaagaagcaaaaagcttaagatgcaaaggagaagaaattgataagcatcataaaacaatttaagacctatctctgcaaacatgactcagatcacgcacttattatataacaagtagattcaggaagccaaatgaaattgaatagactaactttaaccaactagatgcaatagggtgtcagtcaggaagccaaataaaattgaaattttttttttataagcaaagtaatttattgatataagaatgcttgcaatgagcacaagaggtgcccaaaacaggactcaatacaaaacatgatgctgcataatataaagctcaacagcaagctagcctaaaacagacagatattccccatcccacctataggctaaaacacagtccaatgaaagctatacaacctcacgagtaaaactcatgtgtcacaggaattattacgattaaaattagacacatctcacaatttgttgtgtagctataactataagtccacgtacttccacaccaagtcacatgacattaacagtacccatatagtgtttgttaaaatgccaatataagtaatcccactgacttgatattagaaactcatctgccaacacgttgacgctgcaatctgacattgagctacgctaactaccaatttccatctttccacaccagccatccaaatatttaagccttttttaaataaaaaacactcatctcattgaaacctcccaacaaccaatgcatttcatgacagataattctcccacctctgtgaacaacaacatcttcactccaaacaacgtccaaccatcaacagcttttacattctattaaccaacacacaatcccccctcaaaccccctaacagtcctaaaatgaaataaaattgtatagactaactctaaccaacaagatgaaatggggggtgtcagccagttcaaacatttcacagattattacatcagaaacacttcataaaattacaaataaagtagatagataacaattgtaatattctatccgtaaaaaagatgtgggaaaacaacgcaaacttactggatcaaagtcttctctcaagatacctctacttggtgacgccttcttcacttcagcaatcaaccctggaagtccagttcgttcgttggctgcctttagagcaccaataaaatccctagcaggaggtgcattttcgagagctttcttcagcacaccaaggggttttctttctttaagctgaaaatcacacagtccccaataatacattcaatcaatttggttgaaaaacaacatatatattaagaacaatagaacacaaagcaaatcaatcacaatacctgtgagacttctgtgtccttgttccacacaatctcttccaaaatgttccggggcgtattgccctcattctgcaaagggggtccagatggaggccttctccttattcttataccctggctagctgcaacctcattttggaacattcccacctcccactccttacttttcagaacctctgtcacagattcaccagatgtggctactacagctgaaccatcattggactccacctaatcaaaacgccacataatccaaaacccacatgaaaaatcaacaagcagttcctcatagcataaaattctgcattcatacacccccaattgaacccaaattatttggcctatttccattatcactgaaccccaacaactcccaaaacaaaaaccgagagacccatattaatccgtaagaagacacgataaaaggttgcaaaacgatacaaaatttgcaacaacaaaaaaaaaaaatctcacctgggcacgaacagaaaaggatgaaaaggagcttcttttatgaaaacttgcttgggatggaagaatagaggttctgggtctggaagagaggaatggggtggcctgaaagggagccttgagagaagccaaaccttccattgaagcagattgaagggaaaaaaaaaatggaagggattgcgcagcaacagaaaagaaagatgaaacggaaagtgaaaccagggtttaaaagaagaacacaccgtctaatcgtctatgttatagtactagcattgaattgaattggagaagaaaatcgtcgtagcgttcgacacgtgcgccgcgcattcaattccgacgccacggcgtgttcgtggtttttctggccccaagagagtgtaccggttgggattggattggcacatgtgaagagctaaaaatggcacaaaattaaaattgattttggtctgtgccttttttttctttttcaccgcgaagtatttaactatttatcgttttacagtatgactttgtctctcttgtatctaatgttttgctatgctggcttggatcaaccgaactttaagttattttaccttaataaaaggtcttagtttgaatcttggatatgcgtattttcattaaaattgattatttctacctatcatgtaaaatatgggtggacttttctagtttaatatattcatgcatacaattattttttatctagtgtggaagagacaataaatgtattaaataaaataattaatgttttcatttttataattaatgtttaatgcttttgtttttaggtgattttttgttacattagcatatttttgggtacacgtttttatgtgattaatactgcttaaaattaacattgcatatagaaaaatatgaattataatattattagctgtttcatataatgaaaaaggaaatgtcagattgttgcacaggttttataaaattgttttgtaagaattagtatgtacctttgaatggattttatttatttatttgactggacctttgaatggattattaatctatattattttaaccaatgaacatatattctatcaaattttctgatagtgttactttgtgagatgtgagttgatcatatctgacaaacaaaggtgacatttgtaaaattctaaattcctaatattattagtgttatacaatgagaagacaaaaataattatatannnnnnnnnnnnnnnnnnnnnnnnnnnnnnnnnnnnnnnnnnnnnnnnnnnnnnnnnnnnnnnnnnnnnnnnnnnnnnnnnnnnnnnnnnnnnnnnnnnnnnnnnnnnnnnnnnnnnnnnnnnnnnnnnnnnnnnnnnnnnnnnnnnnnnnnnnnnnnnnnnnnnnnnnnnnnnnnnnnnnnnnnnnnnnnnnnnnnnnnnnnnnnnnnnnnnnnnnnnnnnnnnnnnnnnnnnnnnnnnnnnnnnnnnnnnnnnnnnnnnnnnnnnnnnnnnnnnnnnnnnnnnnnnnnnnnnnnnnnnnnnnnnnnnnnnnnnnnnnnnnnnnnnnnnnnnnnnnnnnnnnnnnnnnnnnnnnnnnnnnnnnnnnnnnnnnnnnnnnnnnnnnnnnnnnnnnnnnnnnnnnnnnnnnnnnnnnnnnnnnnnnnnnnnnnnnnnnnnnnnnnnnnnnnnnnnnnnnnnnnnnnnnnnnnnnnnnnnnnnnnnnnnnnnnnnnnnnnnnnnnnnnnnnnnnnnnnnnnnnnnnnnnnnnnnnnnnnnnnnnnnnnnnnnnnnnnnnnnnnnnnnnnnnnnnnnnnnnnnnnnnnnnnnnnnnnnnnnnnnnnnnnnnnnnnnnnnnnnnnnnnnnnnnnnnnnnnnnnnnnnnnnnnnnnnnnnnnnnnnnnnnnnnnnnnnnnnnnnnnnnnnnnnnnnnnnnnnnnnnnnnnnnnnnnnnnnnnnnnnnnnnnnnnnnnnnnnnnnnnnnnnnnnnnnnnnnnnnnnnnnnnnnnnnnnnnnnnnnnnnnnnnnnnnnnnnnnnnnnnnnnnnnnnnnnnnnnnnnnnnnnnnnnnnnnnnnnnnnnnnnnnnnnnnnnnnnnnnnnnnnnnnnnnnnnnnnnnnnnnnnnnnnnnnnnnnnnnnnnnnnnnnnnnnnnnnnnnnnnnnnnnnnnnnnnnnnnnnnnnnnnnnnnnnnnnnnnnnnnnnnnnnnnnnnnnnnnnnnnnnnnnnnnnnnnnnnnnnnnnnnnnnnnnnnnnnnnnnnnnnnnnnnnnnnnnnnnnnnnnnnnnnnnnnnnnnnnnnnnnnnnnnnnnnnnnnnnnnnnnnnnnnnnnnnnnnnnnnnnnnnnnnnnnnnnnnnnnnnnnnnnnnnnnnttatttttattaatttattattattaatcttatacataagtaaagtataggttgcgagtgcggatatgaatatataaatacccaaccagtatgaaaatggagattaaaattactatccgcatagtataacaccaaataagatattattttaaagggattaaagtttctcatgttatatgagataagtttttctcctatacatcaaaattacatagttttggattaaattttttcttctttttaataaaaaaaatacaatcaaaacagatatttctctcacgcatgtctctcctcttgttgctaaataaaagataatgttccttgattttaggagatgttattgataaaatttgaatataaaattggaaactaacttatccttaacaacaaaataacaattttgacttatttaaattaaaattactttaacagtgtctcaaggcacggaaaatttaagaaacaaccgcactattttcctgttaaatattctagcatctccaaaaaatacagaaaaagaaagaggaaataaaaaaaaaatgttccatatgacataaccgcactacgacccctaatcttcgtaagctctaccataccattgcattattcccacactggtgctctgtagaacatttaatctgtatattgttgttgagatcttatcttgaaatactgttaaagtaattttaatttgaataagtcaaaattattattttgttgttaaggataagttagtttctgattttatattcaaattttattaataacatatcctaaaatcaaggaacattctctttttcagtaacaagaggagagacgtgagtgttttgattatgtttttttttattaaaaagaaaaaaaaaattaacccaaatctagtagttttagtatataggaaaaaaacttatctcatgtaacatgagaaactttaatccctattttaaaatacctctcggcttctcccttttctcctctccttctctcccttttcctcctttaaggttatttccctcccttactttgaatcaaacaatttttgtcacccttccctttatgagttgttagtgaaaattgtccctaataacatccaattttatcccgttgccaatagtgggactcgtaccacttacaaatgaatatttccaactaagactaaaaacaattcatttgcacttggtgcattttgtatgcttattatcattataacttgggtttgaattaaaatttcgggattactttttaagaatttgagtaacaaatcaaaccttttaaaatttgaaaaacaatttatttttaagaacttagagaaccaaattaaataatttaaaaattaaattgataattaagcacacacaaaaaaactttcaaactactgggtacaaatatgatacacctgaagtcaaactttgaattagtcaaaatcttttttcttaataaactagagaattaagataaaaaaaaaaggaccaaaataagtaaaccatcccataaagaccaggtgaggggcatcattgaaaattttatctgcagattcttgctaaatgaaataaaacattattctacaaaggagtgcaaaccccacccaccctatatcccttcaactatttttcttttgaaactttaaactcggattcagttcgacggctaataaacatccatcataaggaaattcgaaagcaaagttaacatagaatcaaacaaaactgcagtttcaacattgtttttcctccttatcctaaatcaaaacaatgtgtcaaggtctaacagaggataaataaaattgaattcgtgaggcgattgtagttcccttcatcctgcagagaaaacaaaggtttatttagttcattcattcagcacactttgatcaagacacaaattccatcaataacacagccaacatttcacaagtcacatcagacaaaatactaaataaaaagagcaatgaattactaacaaaaaccagattatctataaaagcttttcaaagaatttagaaattccataaaaatgtcctagacaaaactatcattatagaaagagtgccagccatttcaaaggctcccgataaacgtaatctcttacactgttacacaagtacctagagtagttcctccccaagatgattgaatatgaaatcatagcaccttattgtcatatatgttcgtttgaaaagaacagcagtagaattcatcttaagaaaaccattttataatgcaatcaatcaactcatctacttattggcatttcatacaaattctatgatttacattaaaagcaataccattcaaaataagcaaaatacaacatagaacataacagagtcagagaacagaaagtcacctgccaattaagactgggaattaacaataagcaagcattatgataagagaaaaattagcaaagttatacaccctaaaaaccaatagagtgatcataaagttcactgaaatatggtgcgcttgatttggcattcaatcacattcaacatcaatgcttcatgagacatagattcacgttgaacattcatcaggaagccagaatcaaagaaaacaaacatactcataaccgcataagaagaaagttaagctgagaatctaccatccattttcaccattccctctaaaggatgatctgataaggacgaaaacaacagacaaaatacaaattgatcttaatttgtacaacagtcagacaaacaaactttcttttctgtcgttaatcaaacaataatctcaagtctcaaccactccaatccatcacacttccttgacacaccataaaatgtattcaaacagatcacccttatttacttacttatttactttcaatttcactgtttataaaatattcaaacaagataatggtaattttattctgttctacattgatccattacacttcgcttattccatacggttcacacagcatttagatatccaatcaaagccatattcacttcacatcaagttgttaatgttacatgcaatcacgagaaaatgatgctaacagctgaaacaatacttcttcccaaccaatcaaccaaattagccattcaaatgatattttttttataaaaaaaatatgaacacacaaaaaaaaaatcgcaatctgtgatttgagcggataataaacagagagatccaagtaaacaaaaagaggaatacagaaaacaattaaaaaaaagaacatttttgggcgaagtaatataatttacctaaccagatccgacgatgatgttgttaattggaatgaaaataagcttcacgaagaaacccacgaaccccatcacaacgaaaccaattgcggtacgcatggcaaccttggagaattctaaaatacaaaaatgcattggaaaatcaggatctacagcacagagatttgaatcgaagtggaacggaagaaggagaattgggaattagggtttcacctttgcgatcgggtttgtggcagcgcttcacgagcctcacgctgtcctttgcgaattctcttaacggatcgaacacagaatcaatggcgtccattctctttcttttcctgtctcccgagcttggatttgagaattgaaatggtcaaatgggtgttgattttttgttgaaagagttttatttttatatgcgcggagatttttatccaatcacaaaacatgtgttgagtttattcatttagaaataattatagataaataatcattttcatcacgggcagaaagttgataaatttgttcttaaagatataaattcaaatttttatctcctaaactaaaaaaagagtgtgacaaattatgcattcatttattaacttccgttcattaccatccattacagataataaaagagcttaggtgacacgtttaggtacgaatttgttaggttatattcaaaatataatttaattttcatcttttttttaatcattgtagaatataatattacaataaacactttaaaaaaaagaaaacaaacaaaagttagaataaacataataataaatataatatttattaataagcataatatttatgttcatttgaaatttttattatgacaatattaagtaatgacaaaattaagttgagtcttattttttttgtaagtattaacttaatgactatgcatttttatttgttagaatctcatattttgggtaaggtgttgtctcatattttgggtaaggtgctgtcttatatttttgctttaaaatttctaatgtgaccatacattatccataatatgatactcaaacaaaaatgcataattattaaattaatttttaaataaaaaaatgagaccaacttgattttgtcactatctaatgttaacaatagactatgtttattaattaatattatgtttattattatatttgttctaacttatgtttattttcctaattttttaaatatttattgtaattttatgtttataatgattaaaaaaggaagaagatgaaaattaaattatattttggatagagcgctgaaaattcatctctaaatgtgtcatgtaggatcttttaattaacggtaataaacgaaagttaacggatgaatgaatttatcgcattttttcactttcgaagacaaaaatttgaatttccatcttttgatgataaatttgtcgacgctatacatattgaagaatgaaaatgattatttatctaataattattttaaaaattatataaaaatagtttataatttttattcattaataatataaaaaaattaagactaatttaatgataagaataaaatataataatgtgataaaataaaactataataagtttttatcatatatttgttattatatataagaaaaatagtatatgtatttttagtgtaaaatcttttgacattgatgtataataaaatttaatcatttaatcatataaaatgaataattaaaaaatcaatttaaattaaaaaaagttaactaacctctcaattttttagcactcttatctgtacaactcactgtctccaaatcctaaattccaatttttgagtcactttcctctattccactctctctgaaactaaagtcaacattttttcatgtcacccttcttaattactccactctcctctattcatctcatatttcaacccttcttttttatttttcctaactactcttcgttatcttatgtcaaaactcaaaatgctaactactatttttttttcttcaattaccctattctgcttcactccaccattattatcatatatatattttttttttatnnnnnnnnnnnnnnnnnnnnnnnnnnnnnnnnnnnnnnnnnnnnnnnnnnnnnnnnnnnnnnnnnnnnnnnnnnnnnnnnnnnnnnnnnnnnnnnnnnnnnnnnnnnnnnnnnnnnnnnnnnnnnnnnnnnnnnnnnnnnnnnnnnnnnnnnnnnnnnnnnnnnnnnnnnnnnnnnnnnnnnnnnnnnnnnnnnnnnnnnnnnnnnnnnnnnnnnnnnnnnnnnnnnnnnnnnnnnnnnnnnnnnnnnnnnnnnnnnnnnnnnnnnnnnnnnnnnnnnnnnnnnnnnnnnnnnnnnnnnnnnnnnnnnnnnnnnnnnnnnnnnnnnnnnnnnnnnnnnnnnnnnnnnnnnnnnnnnnnnnnnnnnnnnnnnnnnnnnnnnnnnnnnnnnnnnnnnnnnnnnnnnnnnnnnnnnnnnnnnnnnnnnnnnnnnnnnnnnnnnnnnnnnnnnnnnnnnnnnnnnnnnnnnnnnnnnnnnnnnnnnnnnnnnnnnnnnnnnnnnnnnnnnnnnnnnnnnnnnnnnnnnnnnnnnnnnnnnnnnnnnnnnnnnnnnnnnnnnnnnnnnnnnnnnnnnnnnnnnnnnnnnnnnnnnnnnnnnnnnnnnnnnnnnnnnnnnnnnnnnnnnnnnnnnnnnnnnnnnnnnnnnnnnnnnnnnnnnnnnnnnnnnnnnnnnnnnnnnnnnnnnnnnnnnnnnnnnnnnnnnnnnnnnnnnnnnnnnnnnnnnnnnnnnnnnnnnnnnnnnnnnnnnnnnnnnnnnnnnnnnnnnnnnnnnnnnnnnnnnnnnnnnnnnnnnnnnnnnnnnnnnnnnnnnnnnnnnnnnnnnnnnnnnnnnnnnnnnnnnnnnnnnnnnnnnnnnnnnnnnnnnnnnnnnnnnnnnnnnnnnnnnnnnnnnnnnnnnnnnnnnnnnnnnnnnnnnnnnnnnnnnnnnnnnnnnnnnnnnnnnnnnnnnnnnnnnnnnnnnnnnnnnnnnnnnnnnnnnnnnnnnnnnnnnnnnnnnnnnnnnnnnnnnnnnnnnnnnnnnnnnnnnnnnnnnnnnnnnnnnnnnnnnnnnnnnttttttatctataatgatttgattttcatcgattttcttgattttttgaagttctcttcagtcatgtttacgaatggtagcttcaaatcggtggaatagattttcatcgaatatgttaattatttcgtttcatcgtcctgtgtgagaattagtgtgctccactttgattttatctataagtgagtccctattttattttctctttatgttgaaagttatactttaattaggaaatgggattatttcaattaatgtaattaatctaaattgttatttgattcaattaatctgaatggtacttgataatatattatgaggatatgattattataattaatgatacagcaacattatttcataaatttaaatttaattatattttgatatgagttttcacgtgatattcatgtattttgatatattttatttgataaaatttatgattttgtgtaagtttatgaaagacgtgtgtttaaatatttcacttaaaaaaaatctaaaatcatgccttttatgagataatgaagaccacgacgagcaattattttgtacatgagtgataattttatacatgtgttataatctatactatacaaagtaaaatgttttaaaaaatggaaatctccacgtgacatttctaaagcaactaaatatttggtaaaactaaaattttaaatttgaacataataatgaacttaggggtctgaacataataatgaactaattgataaaactaaaatcttaaatttctaaagcaacaagttttgagtcaaaatgaacttaagggtctaaaattagttttatatataagtccgatgactatggaatttatggacaattagactttagtaatacaaaactataggaaaggtttcttcccaaaaatcatcctatgcaaagagccatgtaatgtcaaagttggccccgttttatcatttcgagtcatttctaagataccttgaatgcataattttggctcttatcatcttgtcttggttttgctagctaacacttactaattggagtatcgtcggtaccaattcaaaacacattgaagctagtaataggaacctataatagtaattactattatgatttaaatatgatttctgttttccttttactattatgaactaggacatgaaagaaaagaaatcaagcacacatgaaactgtagacacgtttaataatttattatcaagaaaactgtacctgatatgaatctggaaattttttatttgagagggttttacctttgaaatccagtccaagcctcaatgccaagcaaagaaaataaaggtccttgcatgaatgaagagtaaaaacatagaagtttaaagaagatcgtgattaactaaaagccagaagtgcaaagtcatagagaactagctaataccaaatacccgaattctcaatggaaaactctaacatttcaaagcataaaaatgcaatttcttctagagaataacacaaaaaaactgaactttctagcaatgtgttgcatacctcccgcaagattgcaaagtttgcaacaaacaaaaggtttctctagggaactccatgcgtgatgatgtcttttgggtgtgagattgacaaaacaaggtgaagataacgacacaatcacaaaatgaagaggttgtgacggagaaatagggacgcacatgagggtttacgggagaaacagggaggtcacgagggtttacgagagagacagtttcagtctcgtacgacagcagccgcgtcggaataagggattaggtgcgacggagaagcaaagccaacaagttgcagtgacgtagacgtaggggaaaagggtttggagttcagggacgatgagaacataaggagcaaacagaaggaatgaacgcgaaaagcatttggtaaaacaaatatagcgtgatttgcaaaaatgttgtacttatataaagttactacaacgctttttctaacaagcgaggtaactttttctttttctttttataaaaacatatgcaacatttaaaatatcgatctaaaaatccgttgtatataaaaacatataaaaacctatacaatgtcaatctaaaaaaccgttgtagatgctggtccactctacaatgctttttttggcaaagcaagatatacatgttccgtgtcaatacatacaacattttttcataaaatgcggtataattggcgctataaattagaaaatctgacaataaatctatcgtatttttcatctcaaaacctcaaccaatctatagttgtaaaattcgatccgatcattggtccgatcgagtcaatgatccaatcgatgagtcattaattaatctgatttgactcgatatatattaaaaattaaaaattatatgtatctattatatataagtatataatattatttgagtaagaaaagttcatccatactccaaaattcaaaataacaattgataataattcaaaatccaaaatctaaaatttaaaaaaaaatctatttttttaaaaaaaatccattttttaaaaaattaaataaataaaatcagcagagttggactggtccaatcgggatccagtaacctaaccagtcaggtttgatcggatcatcttggatcaactatataaacaatccaatagtaaaaccaacccaaataaatcaccaagttcaatcagtctgaccaactaaatcagatcgaatttcacaacactatctcaatccttatttttcttagccaccatcctcttcctcacttccctgtctcaaaaccctacctcttattattattatttttacaaagtatgtgtttgatatttgtacttttgatctatgtaatttaaaatccatcaatatgattcccatcggaatcagggaaggcggattccatagttgcctcacaacctgcccattcgagaacatcttctcgatattttaaaaaacaagtgaatttaattcttatttagttgtcaacaacaaaaaattcctattttgtcctccaagttgtcaatgcataaggactaaatatacatataaaaaccaaatcaattatttaaaattaaagaaattaaaatcaaatttaatatctaaaaacatatttttttcctgccacttacactcctctcatcccatctcataagttataggccatgtttggatataagcttctctagaagcacttttagaataagaaagtaagaagaaaaaaatgaaataagttttttcataagataaaataagttttctattagctcatttgtagatgtcatctcatattttagaaaaactatattagtgagcttctaaaaattagttaattaagagtttatttttgcttatgaaaaaactcatctcatttttttcttcttattttattttttaaaaatacttctaaagaaacttaccactcgtatcctcaactccttactttttccagccactttccaccgcctcattctctcatccaaaatctcaaccttttcaggtatgctctcctccttttccatcttaaaaccttaacttccatttttcctagacatcctttctacccaactcctcttttttttcaaaattcaaatcccccatcttttttttttttcatcttacgctgtcccacttttccatctccaagctcaatttcttatttataggtttttatttttaaaattaatataatctaatgtagtaaaataaaaaaatttaaccgattttcagtttaaaacaattttacaaccatagtgtataactctttaactctgtaaagaatatataattaaattgtcatatattatatataaatgttatatacagtaagagaaagacatattttgtaattttttatatattattttaaaataaaatataaaataaaagaggaaagaagaaggggaaattgaatagaaaataaaagtattaattaattttataaagttatagggcaatttaataaaaataagtgaaaactaattttttttatcatcttaatatatatatatatatatgtatgtgtgtgtgagagagacatattttataagagaaaatatttcacatgattgtgaaatgattaaatctgaaccatataattatatatagagaattaagatgtagtgtcaaaaaattacatgagtttttaagtgaccacatgatattaaatcttgatcgtccatgttaatttgattattcagttcaaatttaatcatctcaccctcatataagatatcttcctctaatatgatacgtcatctctctctcaattatcttgaatctcaaaaaatgaaatgcttgattatcttaataaaaatagggatcaaaattgaagataaaaaaataaagaaatcaaagttataatttagtctattatttaatatttaatgttcattaagaacannnnnnnnnnnnnnnnnnnnnnnnnnnnnnnnnnnnnnnnnnnnnnnnnnnnnnnnnnnnnnnnnnnnnnnnnnnnnnnnnnnnnnnnnnnnnnnnnnnnnnnnnnnnnnnnnnnnnnnnnnnnnnnnnnnnnnnnnnnnnnnnnnnnnnnnnnnnnnnnnnnnnnnnnnnnnnnnnnnnnnnnnnnnnnnnnnnnnnnnnnnnnnnnnnnnnnnnnnnnnnnnnnnnnnnnnnnnnnnnnnnnnnnnnnnnnnnnnnnnnnnnnnnnnnnnnnnnnnnnnnnnnnnnnnnnnnnnnnnnnnnnnnnnnnnnnnnnnnnnnnnnnnnnnnnnnnnnnnnnnnnnnnnnnnnnnnnnnnnnnnnnnnnnnnnnnnnnnnnnnnnnnnnnnnnnnnnnnnnnnnnnnnnnnnnnnnnnnnnnnnnnnnnnnnnnnnnnnnnnnnnnnnnnnnnnnnnnnnnnnnnnnnnnnnnnnnnnnnnnnnnnnnnnnnnnnnnnnnnnnnnnnnnnnnnnnnnnnnnnnnnnnnnnnnnnnnnnnnnnnnnnnnnnnnnnnnnnnnnnnnnnnnnnnnnnnnnnnnnnnnnnnnnnnnnnnnnnnnnnnnnnnnnnnnnnnnnnnnnnnnnnnnnnnnnnnnnnnnnnnnnnnnnnnnnnnnnnnnnnnnnnnnnnnnnnnnnnnnnnnnnnnnnnnnnnnnnnnnnnnnnnnnnnnnnnnnnnnnnnnnnnnnnnnnnnnnnnnnnnnnnnnnnnnnnnnnnnnnnnnnnnnnnnnnnnnnnnnnnnnnnnnnnnnnnnnnnnnnnnnnnnnnnnnnnnnnnnnnnnnnnnnnnnnnnnngaaatttaggattggataatattttaatttttttgggtaaatcttttcgaatcattaaattgtcttataagtaggactgctcaaaattaaactttattaaacacaatttaaataaagatttgataataaccttttaacacttagaaaaacttttttttatatatcaaacaatttttttatgaaaacctcaattaaatttgtaaaagagataatgaaaaagataacaacacaatttttttacattgatttgttttaattcaagaatacatttaatttttggtatatttccactaactcaaacattttgcaagtatttattttgccaatgcctcttcagactcaacatgagtattcctttactttcttctccaagtaactcaccatgttaactttcttagagaacctcctgaggcttcaaccattttcacttagaaaaggttagggataaaaactcattgactatattgtcttaattatatagacaaatgtacaatttacgctctagtctgtctaagacgattagctagaacatatctccttttgagttttgagccgacaattatactatcatactcttaggataggtaaacacgtgtctattgatctagataatgagttatcttcgtttgattttcacaattcttccttgatacacttatggtaaacatttgcatgaaaggccaaaattaaaaaacttagagaaattattgtcttacttgatatcgatatataagtcatctgtataaaggttcttttaaagtctaattgctatatactcaagaatagaaaacatgtttcttcacatcacaatgtgtccacatatactcacatctaagatgtgtgacagaatcataaatgcaggtgtaaagaaaacgaaattctaaattatatatagacatgcatgagaacaaagaagttatgtgagtttttactaaaaaaacattattacttacttgaagggattaatatgtgatagtcgacttaaaaaatatctttagtatacacaaaataaagaagcttgattacttataaaagcatgactaattaacttgaaatccaatattaattatatcagatcctctatcaaattaaaatatttttatgctaataaaaatacactatcataagaatacatgttgcaacttgcaacaaatcgttaatgaacctagctagctagctaatatccatagtcaagcttgtgatgcattaatgtctcatttctacccgtggattttgactttactgcttcttttaaaagagtagcatttgaaagaggggagaaattgtgatggtcacgttgtcaaatttcacagcagccgcaacacaaccaacctggggcaaactcgttgattttcatcactattcactcttctttctcagtctagtttgaaccagtcaaacttgtccaagaaaaaggcatccaagaaaaccctccttttggattcaacaaaacaaagatcaagtcaattacctctgcattcaagaaacaagcatacacgtgcacacagtcagagagacatatagggacaaaattgttaaatccctgtgtgaaaaggatggaacacaatgtcaaaatttaacaaaaccccgtttgacaagctttaatcgcgtacagaattccaggcatttctgtcgttcaatgtctcttgttcccaatctcaaaaaactcaaaaactcaaaaagtttaacaaaagccagtctagcaaatgacatgtacatgacataacatttcaatctcgtgttcgtgtaggttattatatatgcaaactgtgatggttgtattcaattcaccccataaaatgccatctgagtctctattcatgaaaatgatgaattcatttctatacatatttttaatttaatttgatcaaaatacatcgacatttacatcattgtttaatcatagtataatatactagtattgcatgacaaaattattgattcatgtaataattattttaaaagttagacttacatagtttttaattagtttaaaatctaaaaatctttgcaccaataatatatcaattttttccatgtaaatacacatctttttattttaatacacttatttaaaaatgttatatcaaagttaatttatatttttgtacttaattaaaggaacctttttcttaatttctttaatcaatattcaaattttcaattagacaatagtgatgagccaatgacttatttattttccttcaaaattttcaccattagacataaaaatatattttttaaattacaattaaaataatcttatatcaaatcaaaataatttaaactgaaatgtcaaataaatgtattttaatatctcaatttatattttacataataaaaaagttctatcaatcaaatcaatattaccttacatatttttaaattgatttatttttacatttattatattcatatctatccatgcaatggaccagatatttgcaagttgtgttatatataaatgaatattcgttcaaacaaaccagctacaacggtgatttttttttttatatagttaatcccattctgacaatgagttgataaatgctctaagttgattaaaattgaattttttaaaagagaaattaaaattaaagaaaagaaaagaaaagaaaagaattgtgcaataactagagacaattatctgaattaagaatatcaacagggaaaatgaaagtcaacaacttcctcgggcgtaatgtctgccgtataattctgaaaaggattaattagctcttccataccttctaccaagaacaataatttatacttctatgcatcaaaaatctaaaagtatagtgcagcatttattactaatttttaaataaaaaatgatttcaacgaaattgatatgaaaattgagaggagtgttatatataaccttgcaccatgatgattatatgtgtaaacagagaaggttaagacaataataaagtagcttgttattttcttaccgattttaattatttaaaatgtattgataatggaaatgatttttatactgtaatttaattacaaattattatgaataataaaattattatttttataattgttttagaagtcatatataatttctaattaattgactatgtaaaattgtttaaattgatacgatatgaaaattaaattcttccattatttaaaaaatatttttattttagtatttagctattttcttgaaaaaggggaggggaatgaacaaattttatagtaatatcttgtttaattcaaacttttagggagagatctttaatggtagatctcaaattgagatcttaaatcactttttggtggacctgtagtaccatgtaggattgaaaatctctcaagatctttctatcttttttaatggtagatctcatattgaaatcttaaagagaaagaaaaaaggaaaaaaattattcttttttgaacaatgtgaagatcctaaggaatcttttacaagaactcattctccatgttggaaatctcttcatctcccttattgagagatctagtgaaaatcagatcttaagctcaagatctagcactaaaaaaacccctttctgcattacatatggcattgacgccatgatccccgttgagctagaggaaccttcaacaaaaaagatgctcttttcaggaatagtgcaatgaggaaaacatgagagtcgagttggacaccaatgaaaagattcgagacatagccagaattaatgaagaagtggccaagctccgcagcacaagaagatacaattctaaagttcaatttcgaactttccagccaggcgatctagtctggcgtgtccggggtgaagtcaggaaggatcaccgtgcaggtaagcttggaccaaactgggaaggtccgtttagaatcattatcaacctgaacaatgatgcctacaaactgcaggaactcagtgataaagacattccaagaacttggaatactactcacttgaaattctacttcagctaaggagttgaagaccggatgacgtactatttttcctattcaagtcttttgtcccattggattttggtttgaaagattttaaccatgctcatccgaggaataacatatataactatatctgatttaatttttttcctttcaattttttgctttttaaaaaattaatttttttaaaacaaatttcaaaatttgatagatcatatttaaaaaattaactgatgaatagtataaaattattttccgaaacagtttttaaaatgaaaaagtgaaaagtgaataaaacagaacctaaaacatcccttctgccttctcacaattttgtcttctaatattaggaaatttgaaagaaagtaaaacggagtttaaaaaaattgaattattttttttggttgcaattttttaaaaagtatattaacaatctgaccattttcatgtattgccatttactcatttagattcttatttattatcataagagtataataatacgttaatttcattgtttttttctcatcctctttaattttgtcttcgtcctcttgactaaatagaaaagaaggatttatatttttattttcctatcctgtttgatcgtctctcctctgttaaaatctttggtatccctttacttccaaaccacataacatatatatagtctttccagggctgttaagatggtagtaagacgcatctataaatatgaatataatgaaagatgaagatccaatatttaaaagaaaatatgtttggtaacgggaacgtagtggttccgacgtcaaatatcaaagatgtagccccaccaaattttataatgaggcagcatgaactttaatccttttagatttatatgtaataatcattgagtattctagtttcttattcccgtgtcaaatcctcaggtttaatcactgtaccgcatataattaagtatctatctatctatctctatatatatatatatatatatatatatatgtgtgtgtgtgtgtgtgtgtgaaattaatcttttgagtcgtacgaaatggttaaatcaaacgaaatggttaaatcaaactctattcatgtgaacaatttaataacttaattactcaagtccataatatttcaattataagtaaaattaattggaacattgatacttttattgcaactaaatatgattggattgctgatgtttgctcagggaattatatatcaatacctttttttacaagttacagttaccacattttgtcaatttcacatcaattgagattttgtttgactacttttctatttttttctttctttctaatattctataaaattattagtaaatattgaataaaaattaaatatattaactatcttaaaaacataaacaagttcaacttttatatattatttagtaaagaagagataatttgtaggaggatgttataaaaaataaatttttatatttttaatataaatagattataattgacactataattccttagccagtagaaaatttcctttttttctttcaagtcaattttagtgtcaattttgaaggttttctctaaaggaaacttaagggtacatttcatatggaagatttcacaaggtaaattatttgttcacattagctttaaaatacaaatgtattttttttataatttattttatgcttataattttgaaattgatttacatattttttttattatgattatttttagtttggtcattcaactttttatttattttacttatcataaaactaattttttaaaacaggctttactgttcacttttttatgactaaccattaagttatacatgttatagattggaatcttatgatttggtatactaaatttttttgttgacttaaaatagaccaactttatcatcacttgatagtcgcatgtcatgtcagctacaactataagataataatgtgtggcagatgattagatgcatgccatattcatgattgttttagaaatttaaacatttcataatatccaaatccattaaaaaattaggaaattaaaatcaaattaaattacatttataagattaaaaatatattttatctttttgaatttctatcattacaagagaaactattgatttcttattattnnnnnnnnnnnnnnnnnnnnnnnnnnnnnnnnnnnnnnnnnnnnnnnnnnnnnnnnnnnnnnnnnnnnnnnnnnnnnnnnnnnnnnnnnnnnnnnnnnnnnnnnnnnnnnnnnnnnnnnnnnnnnnnnnnnnnnnnnnnnnnnnnnnnnnnnnnnnnnnnnnnnnnnnnnnnnnnnnnnnnnnnnnnnnnnnnnnnnnnnnnnnnnnnnnnnnnnnnnnnnnnnnnnnnnnnnnnnnnnnnnnnnnnnnnnnnnnnnnnnnnnnnnnnnnnnnnnnnnnnnnnnnnnnnnnnnnnnnnnnnnnnnnnnnnnnnnnnnnnnnnnnnattactttaccaattaaaatttagctctttcaatggttaggcttctccatcttcgctaatctttttatccaaaacaggaagacaaaaattagataatatataaacttaacataattcattttgtaataattaatttgagcactaggtaagattatcaaggagttcttattataaaaaggtagtaaggaggaaaagatgtccctagctagtttatatcaaatttgcatgcattaattcgggatttaggtgtcagatagaaaagtcatatacaaatctgagaatcaaacaaataataatgagtttatatcagatttaccgcaagatgatttaattaattaattgatttaatttgactatcaaattaacacttactcatatattggtgcatttaggagcatgaattcttataagaattagcataaaatctgaataatcaacgcatatgcacatctataattactacaccgactagtggtctatcccataggttaaatcgtcttttccttgatacacaacatgcaaagtatagttaggtgggtttttgaattatcgaaatatgagaaatgagtgtcaaatgatttcccgtgttaccgacaaactaatgctagcaaaattaggcagcgaatcatgaaaacgaagtttaggcttttagcagaaactgttacgtttcaccactttctaattatatagattttcccccaaatacaggcttgcaaatgagtcagaacattatccttatattaaagcatgcatttgtgatctccgaacaaaagaaattgattaacatagagagagaaaaaaactcatccatcttaattcccaccattcaaatctgaaacgacagaaataatttggttcctttatgcctaatcaatactagtaatttggacacaagaaataagagagagaaagagagagcaacatgcaaatgaagagggacttggaaaaccagccacaaattttatttcactgtttttaatttgacgaccattgatgtcctaaaaccgtttacaaatgtcttctagctgtaactatctctattctctaagacttactgaaccgacaaaaatataacaagagtgaaaatataagtgatatcatcaattgcaacttgcaacacacataaatattattactattatagaaattaaaattaaagaacaagttgatgaataaatgcctggctttcccatgtacgcctaatcttcctccactggtgaattctccaccagtaacaacgagatcctcgtcctcaaaatcatatcttatacccatggtgaggttgaaaatgaatctccactgaccccacatgagttgcaatggcatttttctcaccactagtgccatccatgaacctcttcttctttttcttgttcttgttcatgactatgcagcagattgatgccttaaagaactaaaaccataatatatatttgtatctagctaggatatggaaatggaaagagtaattaagaatactaattaaaagggtatcactttgtttaataacagagagtgagagagaagagatagagagaaaagggagaggtagaaggagaaggttgttcccaagaagatgacgagcatttcccgttgatgttgttttcaaagagtgttttaatttccttagggtgggccaggaaagaaggcatttttgtttcacacgttggggtggttctctttgtcttccccgcaaacaacagtcaatggttttaggcttaaccctcaatgaatgaatgaccgaatccactttatttatttattctcaccttgtcttcctccgtttctttaattaggtttcctttcttttccttctgcctctcctctccctatgcgttactagctgtatagcttcagctgctagggaacaatgtacatccaaaaaggtgtattaatatagactaaccagagtgtacatttctagtaataacttatgagatatttatatcatctgatcataagaaaaatataattttaaagaattttttttttgaataataattatatttttaaaccaatatttgaataataattataatttcaaaaatcttatataatttcccttaaaaaatcgtatattatttttttaaaaaacacataaatataaaataattttatataagaaaataatgttatctgatttgatatctaacctataccaaaagcttaatatatttttatcgtatcatactcttgacctgcatttatttttatcttattacatcatatatcataatcaccaaatgagcttttatactaatagcacttaaactttaaagtaattaatatacacacacatttactaacatatatagcatcttattttttaaaataaacatttaaacaaattataccttaaatgtttttgaaaataattaaaaaaaagagtagattctactaactactctagagactttgcgaaattacacattttttttaacatttaccgtattatgtcttataggagaatagatgtgatgtttttcaaataattaaagaagttaatgtaatatataacatgacataagtgtatatttgtcaataattaaagaggttagtgtaggacaatcggagtacataaaaacacggagagtttatttaattacacaaaattttaagaatagttagtataatttattctaattaaaattataacttagtaaataatttattttcttaaaaaaagagagagactgtgttaacaaattaatattgctatatacatttgatagtatgtatgacacttgtctctatatccgttatattaatttgcacttacttgtctctccatttatggctatacttatatagcaattcagtgtaaaatatggaatttggagtggtagatgtttaatcaactcgagtataatcttgttgaatgtaagtactcgataggggactagcagattcgatcttttcgcgtgttgtttgaagcttgcaaatgtcaataattgagcaaaataatgtgtgactgatagttcactgcatttgataccattacattcgagtgatgccattgctatcaattttgatgtgattgtgctatcattttatatgcatgaaaaaagttctatataaacatggtgtgaatcgatctgtgagatttcttttaacttctttttaaaccaaaattgctgtatggtgatagatacaatatgtaaagttcaacacataaataatgtgttttgattgataaatattctccaacaatagtttatttgccaatacttgtgatgactttaaaagtgagactgtatagtaaatagtaaggagtcccgtacgtgctaagcacgagttgtgtcaatttcaatgtttaaatatacattaatatataaatacacatgctatttttaagtaattatgtgatggaagatataaggtttatcaaactgattgtgaaagagtaaaagaagctggttagaatttctgcaattgatatttgtgacaaaattaacaaactaacatttatctataaaaataataattatgtgactannnnnnnnnnnnnnnnnnnnnnnnnnnnnnnnnnnnnnnnnnnnnnnnnnnnnnnnnnnnnnnnnnnnnnnnnnnnnnnnnnnnnnnnnnnnnnnnnnnnnnnnnnnnnnnnnnnnnnnnnnnnnnnnnnnnnnnnnnnnnnnnnnnnnnnnnnnnnnnnnnnnnnnnnnnnnnnnnnnnnnnnnnnnnnnnnnnnnnnnnnnnnnnnnnnnnnnnnnnnnnnnnnnnnnnnnnnnnnnnnnnnnnnnnnnnnnnnnnnnnnnnnnnnnnnnnnnnnnnnnnnnnaaagatcaaattacattagtataattttaataattattatatcattttataatttgatataaaatattatttttattgatctaaccgctaaactatatctatatattataaagatcaaataaatatgttaaattttattaaaattgaacaaaaataagaaaataatcaaatgatctttattttagtatattttgaaatgtttatattacatcaattttaatatatatgaacgagataacaaataatctctcctcacatatatatagatatataaactcttagtgataacatttgtttattatgagaaatgagatcactaattaataataatctttggattaatattaaaaataatagatcgctcatgttaaaattcaattgtagtaatatcttgtgagatcactaattaatgttaccagcactactcatattgtcactgttgtcaacttgtattcgctgccaaaatgaaaactataggatttattatttttaatattcatctaagggttattatatataaaatatattaaataagaattattattattgtagaaaatgaaaactataaatttagacaataagattttggagatattttgaaatatacaaagttcatgattatactctttggtttgtaggcagggatggatcctaaaaggttttgaaggggggacattttttaatatatgtatatatattgtgttttgattataaaaataattcgtcagtaagtgttaacaatctgaatctatatttaacataatctattaatggtattggatcctattttgcaaaattttaattgtagtatagccatttaatttataccatcagatcctagctactctgcaaaatcttaaccatatcgtcatttgcaccatatgaaaaagatcatacgagagggggaaggggaaggattcctgcctactccccttggatccgtctctggttataggattctagtgatacctctgtagttaacgggggagtcttcttataaaggaattattaaacacttatgtaagtagtaattttgttatagttataattaaaggtaaaatctcgtacttgtgaagaaaaagttgtatgatgattttaagttgatggctttgagatggaagcaatgatgattttgatgatcaacctcacagtcgatatgatggctagttatattattcaatttaataatatgaatgcatgctaactaacttcaattagtaaaaaaaacaaataaaacattattaaaaaatatttatataaattaatagttaaataactttaaaacaatacatgacaacctgtgcgcacagataccttgctacttaacctttataaattgacacaagaccagtaataaggcaaaaatctcagggagttcttcctttgcattcctaatcccttatcctaattaacaatgcatacctatgtgatgcacccaatatacgtaggacttccacttttccaaacaaatcaccataaacatgttaattgccaattttaaacattagcaaaaaagttattatagaaccaaatatttaatatttttttagaaaagcattatgattatattattatattatagcataatatattaacaacaaactcaaaataaaaatgctaagaaaaaataatcgttaaataatcattataggattctagctgttgaaccaaaagataaatcaatggcttgaatgttcttaaaagaaactgaaaaagtattatataaaatgttgacacttggcatcgagggaagacttttataataataaatatattttacaaaataagcgatatttttataattaaaataatcttttttttttcaaaccaaacaactttacaaactaaaccgtaaagccaatcatttttcggactttacatgacaaaccaccgtcatccaaagtgtttgtttttttggtcgatggtcgaaaccattatccaaagtccaaacaatctataatgttgcaaattgggtccattgcggaccagtcgacgtccacggctcaaatttggtccattgcttatactaaaatccctattttcacggaaaacgtttccagaataggttcagcaatgtctcgtggaccatattttggctgaacagtgatatatagatatagatacatagatataaattacacaatcctcacccatcaccccaatttatttgcagatagtagctagcacatatataaggttgcaaatcagtcccacttggagtaaatcaattaagattaaaaattttgaaaatattttaccaaatttttttaggaaaatatttttattaatatatttatgcaattttttttattaacataggaacaatgataatttttaatataatttattcacgctctcaaaatttttacaaaacgtttaaggaaaaataaaataaaataaagcgtgagacatgaaagagagaaagtcacaataagaaaagtaagtctgttcttcctgtttctcctacttattcatcactttctagatttccgtcttaatttctaggcgatcgataatcatactcttgttcaagagtatgtcatgtgatctctccttcgtgaccattagtcaacaaagaaaagatgtgttcgtggaaaaaggaaggaagacttcaattaattacaaatttcaagctagaattaatacatatgttgtagctggggtaataactagataaagatctaaacatgaagttacagtacgtagtaacaaataagtcataaacaaaagcatagctcattcaatctacacaactagtacatgaagttgattcatttcatttctttccaaagctgaaaatttgctcttcagtaacccaacatatatgctgagccgagggaaaatcaattcagaatacaagtgcaaagctaagcaatatgacaatcattccctatatttgtgtaaaagtaaagtaacctactagttataactcactagaccccactccaaaagaaaattaatcttttaaccatgtcttacctactctctaatttgtgaaaaattattacatggtccagatcattgcatattgatgatgacctagatcaatcttcgcgtgacatatgcatgtgtcacaaggagattgcttcttacacaaaatggtcttggatcatgtaataattttttgtatatgatttttcaccaattaagagaggttcacactcaatagcttgcaactccttcatgagcatcatcaccttatctagtagccaaaggaaaccaacgttggtggaaggaagattggtatgccatcatgaacaacacgaagagaagcaagagtgccactccccacggagaccctccagctctgtgcagcgactccctctcctccggcaagggtattgggaacgacgctccgctcgagaggcagtgaaggaggagcaacaagagcagcggcacgagggcgaggaagatcttaacctgcacgagcaagtcctcgagcaaggactcgtagtttatgtaccacgagaacgctagcacgaagaaaaggatgaacacgaagaagacgaggtggagtgggaaagacaagtaatcccacaagtagtagtagggatcgtggtacctggccatgttaagggaaaataaaatatagtgatgatgttagtgagaaatggttgagaatgaatgaataaatgagattttgtttggtagaaggaaggtgtttcagatattgtgtggagtcttctaggggctttgatttgaatagacagttgggtcaaaaaggtttatataagcagttggactactatggactacatccatgattatttctttggcactaaaattagaagagattggtctcttttatcttgcaatttttattgcaaaaaattgtatgatatctatttctttgaatgtatatagtcctttagaaagagaataataagaagagaaaatgggtggtacgaagaactaacataagaaacagacaaaagaaatgtgataaatcttataataagaattattttctctctctagatagtctttaaagtgttgagagtatacaaatttttaaagtattgaatattcattgatttaagtgttagatgcattaatgtatattgcttacatttagcgactaatttgaaggatttttttttagaacttgagagattatttagtaagatttttgcttcttgcggaaggattaattatataatttgcttaatttaaggattatttagacgagaataatatatactttaaggatgaaatagataatttattacaaaaattcatgttatcttataagaaaatttattttgtttataaataatggagaaaatgtaaaaatttataaaatataaaatggtaacaagaaaatgggaatgaaaataaaaattgaatcctatttttttatgtcacatgatgtgattaatttttaattttgtcttataaatataaagtcacaatctcactagttaagtttttaggtctagttattacttgaaaacaggagtctagtcgtttcgttggcgtccgacatcgaatagaaccaaaaaagtaaaaagaaaaaggagaaggaaaagaaagtttaaatatgtttttagattgtgtacctataaatatttttttatattttattcattttgattcatataaatcttataattcttaaaatagtttttatcatttaatgaaaagataatatacatttaaatatattatattcgtaattattttgaggtgacgtgtgtgtaggtgacatcataaatagtaagtactaattttttttttttataaactataaaatttataagaattaaaattaaaaaataaagtcaaatttcactgtatttaacaaaagaaaaacatacgtatactagtatattataacaaagtgaaattcctgtccattttggcatggcttctactgcttcaagagaaagtagagattctactttttctattctgatgagtagtgacgcatcgagattatcccagtgacggtgagagtgagaataattcatggttgagattcaaaatggtgtcatccaataggtgagtgccagatactttggacactggaccagaacgtgtgaacatgagaaaaatcaaggaagttaaattatttttagaagccatgcactgtagtttgtgataaattggagacaaagtggggtcatagcattgggaaaactgcatcttgcttattggagggtggcccataattctgttttcaagctttattcgtagggtttggcgagccatgtccgttcagagtatcttatcagataaaattaggtggatttgcatattcctatgaaaaaataaatgatattggtaaacctcgctaagtatagtatatactacactcaatgatatatagaagagaaaataaaataaataaaagataaatattatataagaatatataaatatcattattgatcgattcctgttatccatcaaatccatgcatgctccatcatgcgttgttcctccgttcctttactgcagcttactttctttagttcttgaaatattctcttaccaataatattaataatgcagagcattgaatctacgattttgttttggtacgttggaccactgtagtttaaatccaagcatcataataaaaggatatatatatatatatatatatatatatatatatgatgaataaatccagttgcacgtatggagcaaacctggtcggagctaggctctcgtttcattcatttaattggtactcaacatgaacaatagggtaataacaagtttaaaatatttcatgaaaaacaagtttgaaatatttgaaataattatttataatataaataaggtttaattatgtttttaattctttaaatgagaaagtctatctttttagtactttaaataaaaattgatatttttcaatcactctaatttgaaacatgttcattttagtccatctaatttgaaaaacaccctttttagttcatctttaaaattggaaagactaaaaaatgcatttttttttaagaaatagactaaaaaaaatatttttgaatttgagaaactaaaaaaatacatttttatttgagagactaaaaaaataaatctccttatttgaggtactaaaaacataattaattttagaaaataaagttatgaaataatgagttttaataatttaatcagtcacaagggcaatgcacaacacatacataaactttaggttgaaaaatataattttataacagtgtgtttaatagcacaataaaataatttattatatcaaaataaatcaatgatataggaattggtcgcaatcctcttacaaaatgacaagatatccttccctcaaaacaccccttgttatttatagaaaaaaagccttaaccaaattaaactatctcacatgactaacttactcactaatataactaacagataggtaactactaatggggagtacgtaacacttatgttctcgacttttttcaccaaacacaaaacaatttattcaaaaggtgtagtatgagaataatttttatggcttctgacgcttgtttgatatgtagcggaaggagttatcccgagtgacgcatcaaagtgatagttatttttaactttctacatcatttatgtgttatagaaaatagttttttacatcgattatactcatatcaatgtaaaaagtatttattgtattcaaaattgatcctattagaatctctcaaatctttctcattcttgctaagatctttatttgataccctttttgtgttctttacttctgttgttctgtgtgattcaactcttatttaagcaaatatgtttgcagatcatgatttttccaacaaaatttaatttgatgattgattaagcttcttgatatatgaactaattaacattgtatgcatatattttgtgctatatgttttggaaaaatggcatgttatttacttcacaattaattcttatttgagaataagatgtgactgtaggccaatagagaattggataatactataaaagtcagtctttactggcctattggtgttgatttctttgactcaaatatatcagagttacttttgttgtcattatttataattgtctttactttgtttggtgtagagtgcccttccccagaactgagagaagtggtcaagtaaacctaacattgcgggagtggtatcgacttaaacaattcagggaggtatgttggataaattgattttttgtagttgtaaattttgatgtcaatctgtcttaatattgtgaattttatttcccagtgttgttgaagaaaagaaaaatctaattcttacggttccagatggatgtgggcgagagtatatattcacccttaaggtgattcatttattatatttttaagcgaatgagaattaaattcaagtagtactactatttctaaaatgccttattaattgtgggccatataaattctgattgttttctcaaatatcaggctgagacatcagaagacctgtttgaatgaaagacaactcttgaacaagccctcgcacaagcaccaagtgctacccttttttatgggacgcaatgggattttccggaatgacgcaagtgatcattctaattctattaagatatcgaagggtctttccatcaatgtatgtgtccacattttcgctaaattttgtgttgtgcttccaaggagggacaagcgtccaattaattctgtaagtctgtgattgttcaaataccaattctgctagcacttgaagatattgatggaggcatgtctttcggtctttccttaaaaaagctctttgatttatacttgctagagaagtatggtaagttatgatcttctattgcatatatgtaatgcatctgcatttcctttcacttcttaagtgtccgtgatgaaattttagaagttatatatctaagattcaaattcgatatcactaaatcttgagtaagttgattcatgtacttagtggtaattaaattattgacaagtttaatattaataattacattgacttagtttcttaattattaattaaaagagtatagaagagcagagggtagaattatatatactgtatagtaaaaagatgtgtcacctacatgcctggttggcggaaagccagccctagcacggatagagtccatgcttttatttcttatttcttacatatgtactagttattacatggagtacacacaagtatatgtgtgtttagttcatatatttgtgaattttacttcagcaacatttgcagccctttcgaccgcagcatttgcatcctccgccatgtcctccgccatgtccccagcctccaccgtgtccccatcttccaccatgtccccagcttccaccatgtcccccatttccacctcttccccaggcatctggctgtgtctttggttcttctgctgcacaggaatagacaaacatttttaaatattgcactgattggttaatttatttctttttcttttttcaaaagttacatttacatgcataactactaagcataataaaattaatcaacagtaacaccattattaaaattcattgtagcacccgaaaacaatatattatggtagaaatggggtcttgtggtggtatgcattacttatataacagagccaatatatgccaaagcgaaagcaataatgcaaaacaaaatttatttttgattatgtagaaaataaatgtataatgtcttatataccatataatttcaattggcaataaaaggaggagaaacacgccttaaggtgacgacttttgaaactaaaactgaatagcaaaagttcgatgtttggattttgtttctcggtttcaacactgcaaccttggacaatatatagttgcatgcatgggaaattattctaaagatttcaggagaatttttaaagtttggataatttgtaatgtattaaagtggcactgctattgctgcgaatgtagaaaagtatggcacttaagttgcagacttgtatagcttcaatgttttagaaatctcaaataacttcacacaaataagtcaatacatgaccaaaatatattaaagaagaaagcaatattgtgcaggtatggaaagtggaaactacatagccaccacactacctcagcgactagattaggaaataatttaaatttcaaaattaatgtttgattgttttactgagaggggaataggattagcaagcaattaaagaaacatgaagactaagtggaaggataatggttaatcttggtgatttgagaaaggaacaattgcagctagctatataatatacattaccttgtgtcccatctttggatggctcagttgccacaacagagatgagaagcagtgcgcagaggaagcacaagaagaaaacgggtttgttattcatttttgcaattaggttatataagatgagttgctgtgaagtatatagaccgtgtttctcgacagctatttatagtgatcatgagagaagataaacgaaaggagataaaaaaagaaacgaagtagatgacagtggtcattaaattcgttttcttaaattatggtatttatcttagttagataactggaattgtttggctgattgcgaggataatagggggtcaatgatccttatcaacaccgattgagccattaaagtgttagactgggacaagtgtgtatactgaggtaaccaagtttatcagaagatggcaactggcaagtgaccaagacaatgtgcaaactggttgcatcatatttaattatatacaggaaataacaaggatattatatcatataattaattagctttaaaatattcaacaaaattgctacatataatcattaatcgacatggatatattagtgtttcggttgaatatttcaaaatttaagtcccacattaatagtttcgggatttcttgttgggtttctcggatcctcaaatatcaaattgtagaagcggaataaaatcaaagggggagcgagagagacaatcagaatttattttacgtgagaaaaccttcctcaatgtgagaaaagaaaaactcacaggacctagtccaatatcaaatccactataacaaatatgagttacaatgaatcaaaaacacaccaaaatggtggtacactcaacctctccaacaatggtggtcactcaaatgctcacagtgtttcattctaagttctcaaatatgcaagcacggtggcttgctcaaatatggcactcaagactgtcacttgaggctctcaaatttccgtgtcttttgcctccacccttactcatctatttataggatgaaataagtttataatgggctgggcctaagccatcaaatatatcttatcaaataaaaacaagattatatcttatcaaataaaagcaagattatcaatcaactaaaaacggaaattatccaacaaatctcccccttccgtttttcagtgagatcggggtcttcaacttcaacaacccgaccttctttctcggcttcaatgtgccgaattcatcagtccggctccttcacagcaatcttcaaatttccatgctggtaccgacttggtcatcatatcggaccagttcaaatcggtgtgcactttgccaagtgcgagctgtccaacctccaccacatcccggatccagtgatatctcacatcaatatgtttggtgcaggagtgataggtcgagttcttcgcaagatgaattgtgctctggttgtcacacatcagctcgtacttatcttgttcatggccgagttccatgaggaacttcttcatccacagcatctccttgcttgcctcgggtcacggcaatgtactcggcttcggtcattgaaaagactttaacctatctaaggattcgcccactcatccattctataggcccatttgatgttagcgaccatgacaacctccaacactagattagggaccttcttagcacccgcaacttacatacctactcacatgtaatgtcattcatcaatgcatatcatgttatgatcattcaaatcaatatcatatgtcatcacaaatttattcatcaatctcaacaccataagagattataatattatagattcacaattcatacgttaatcacattcatgaacccacatatagttcaataagcataacaatacattaatttcgacaccttgatttcttgcaagcaactcacagaaactcttgaatgtgaatatgatgatctcaacacaaagtcaactctaataataaaacaacattatctcaaccacatctcatttcatcgtacattcattaagatctcaaataattattttacataaggaaaacaagcattaatcacatccacatccaaattggtcattggactccaaactaatcactagtactcaaaagggtcactagacttaaaatgatcattggactcaaaactgactattggactcaaagtggtgtgatgtaggctaagcacggcaagcgtaccgctttgtcaagtagtaacttggtaagtctgaggtcgatttccttagggaacttgcttgtactgagagttgatatatgtctaagtttaagcgaacacaaatttaatttgaaagttttctactctaattgtggaaatgtaaagtgcaaggtaggtaaagatagttgagcatgggcataataaagagatagaaacacacacttgggggtgcaatgtcggtagatgcggaagatggtgacgtgtgtgagttcaataaaccaaaactaccattgattcaatattaaaggtatttctctattcaacgattaagttcgctcacccttatctactaatgtattctaaccttgattcctcaagcactaaaagcctaaatcacttgatttcactcctgatccctcagcaagctagatctagtaatttgcattaagagtaaagatgattcgtaacctaggctaaacaacatcactccatccctagacatgacatcatttagaagcgtttttcagttctaaggaaacaaccatttctcaatgcattgaagccctataacaaagcatgcatatgggagatcaaatcacacacatgaataagctcagaaaaacacaatgatatgaaaatagcattaaatagatagttaaaattattacatcaagagtatagttgaaaccccaacattggatgggttagcttcccattttcatgagagagcttacaaatatggaattaaagaaggagagtggaaggggaaggaaggaaatggaggaagagagccccaaaatgagtgggatcctcccttctctcgtgccctagctctgcctcagcctccccaagtctccatgagagtggatcagcaaaaagctcctcattttgtgcccgaatttctcttttatagtggcccagaattgcggtgctcgctgagcgggaaaaggtcgcgctgagcgcgccctcccttgttcagctggataagtgaccacgcgctaagcgggcatctgacgcgctggatgagcaactttagacctttaattctcctcttctttccttgcagtgaaatctctacaaaaacacaaccaacccctcatgaatcaactaaacttagcatctgctggacaaaagctcgaagaaagctaattcttatattttatttacaaaaagaagcatcaaaataggaaaagaatagataaatgctaagtgattaatatatggttttacgtatgcttaacaattatcatggtggctggactcaaaatgatcactggactcaaaatagtcattggatgcaaaaatggtcaatggaagcgaaactggtcactggacagaggtatgacagagattttggcagggtcgagggagagtaggtgcaatggttcttgtattgcacaaaggtatggacggagatttttccagcgttaagtgagagagtagtggcgatgagggtttgctcggtgatgtcaagtctatagatcattttaattgtttttcttaattttcgttttatttttggttttattgtcgaatcattgtacctcttgttcttgcaaggggagttcttgtagcaagtgaatacagagatgttggtactcgcccttgaagtgaaagtatttcatggtttgatttggatttaattgtacaatggttggaggacaaagagaaagggacaaacaatgatgttgtgccataaatgaatgatttagtacacaggtggatttgccttttttgttttgttgcatttgggttatttaggtgatgtttaatttgagtgtttaatttttgttttctttttttgaaaataattttcattttcaagatttaaaaaaacatgtatcgagaagaaagtactttaaggtgtcacaacattttcacttctttagaaaaaattggaaatgttaatttgttgttaagttttgagcctatttttaaaaacattttcaaagaaaatgtttttaaaattttaaataaatatattttcacttttatttttttgttttccttgaaaatgaaaaaannnnnnnnnnnnnnnnnnnnnnnnnnnnnnnnnnnnnnnnnnnnnnnnnnnnnnnnnnnnnnnnnnnnnnnnnnnnnnnnnnnnnnnnnnnnnnnnnnnnnnnnnnnnnnnnnnnnnnnnnnnnnnnnnnnnnnnnnnnnnnnnnnnnnnnnnnnnnnnnnnnnnnnnnnnnnnnnnnnnnnnnnnnnnnnnnnnnnnnnnnnnnnnnnnnnnnnnnnnnnnnnnnnnnnnnnnnnnnnnnnnnnnnnnnnnnnnnnnaaaaaaacacactcaaactaagagtcactttaaatttagtgtttctatttgggttagtgactgttctatgtaacatatgcttgattagtattcttattagcattttccttcaatttggcatgaataaatgggaaacgtttggggaagggatgttattgtagaaagaaaagaagaataaaacagtagatgtgtagatattgtccaaggaagggaagaagaattaggaggaatgagatcttaattagcaattttttttttattttttttttacaaccggttgatgaatgactgttataagtaaaaatgccatgttcacaggtgaacccctattttgaaacacttcaccatagacaaacccctttatataggctctctactaatcacaaactaaatctctaatagcttgcagcctataaaattaactttcaacatgattgatatatatatatatatacatatatatatatatatatatattaaaaatatatggaaaaggatatttggtgaagataatttcgtgaaatcttgaatgaataaatatatagtagcgtcaatgaatataattttgttgcaaattagatactctacgtaaattgtcaaattttcattcatggatcaacgtaaagtattatatgaaaatggaacaatgaaaccgatcgagtatcatctccaaagctacatttaagttcaacaaagaactagatactagttgtctaactctagactttggttccatgtccaccaacacgtcctttccctttattctatatgccatagccttccttaatactaattcaatatcctccttcgccacctttgtgtcctctatctttgccacctttttctctttttccatgatcatcgtctcctttttcatcacctccaattcctcctcctttatcgccgccaccagcaccatagcctccgccgtcgccaccactagaacctcctccttcactaccaccaccaccaccactgtaacctccgccacctgatccacttccaccacctccacttcctcctccttggctaccaccaccacaacctccaccacttcctccttggctacctccacctccggcactgccccctcctcctttgcttccaccaccttcaccaccaccgccgtaacctccaccacctccagcgctacctcctcctccttcgctaccaccacctccagcactgccccctcctccttcgctaccnnnnnnnnnnnnnnnnnnnnnnnnnnnnnnnnnnnnnnnnnnnnnnnnnnnnnnnnnnnnnnnnnnnnnnnnnnnnnnnnnnnnnnnnnnnnnnnnnnnnnnnnnnnnnnnnnnnnnnnnnnnnnnnnnnnnnnnnnnnnnnnnnnnnnnnnnnnnnnnnnnnnnnnnnnnnnnnnnnnnnnnnnnnnnnnnnnnnnnnnnnnnnnnnnnnnnnnnnnnnnnnnnnnnnnnnnnnnnnnnnnnnnnnnnnnnnnnnnnnnnnnnnnnnnnnnnnnnnnnnnnnnnnnnnnnnnnnnnnnnnnnnnnnnnnnnnnnnnnnnnnnnnnnnnnnnnnnnnnnnnnnnnnnnnnnnnnnnnnnnnnnnnnnnnnnnnnnnnnnnnnnnnnnnnnnnnnnnnnnnnnnnnnnnnnnnnnnnnnnnnnnnnnnnnnnnnnnnnnnnnnnnnnnnnnnnnnnnnnnnnnnnnnnnnnnnnnnnnnnnnnnnnnnnnnnnnnnnnnnnnnnnnnnnnnnnnnnnnnnnnnnnnnnnnnnnnnnnnnnnnnnnnnnnnnnnnnnnnnnnnnnnnnnnnnnnnnnnnnnnnnnnnnnnnnnnnnnnnnnnnnnnnnnnnnnnnnnnnnnnnnnnnnnnnnnnnnnnnnnnnnnnnnnnnnnnnnnnnnnnnnnnnnnnnnnnnnnnnnnnnnnnnnnnnnnnnnnnnnnnnnnnnnnnnnnnnnnnnnnnnnnnnnnnnnnnnnnnnnnnnnnnnnnnnnnnnnnnnnnnnnnnnnnnnnnnnnnnnnnnnnnnnnnnnnnnnnnnnnnnnnnnnnnnnnnnnnnnnnnnnnnnnnnnnnnnnnnnnnnnnnnnnnnnnnnnnnnnnnnnnnnnnnnnnnnnnnnnnnnnnnnnnngctaccccctcctccttcgctaccaccacctccggcgcttccccctcctccttgacttccaccaccaccataacctccactgtcgcccccttggcttccaccacctcctccagcttcgccacctcctccgcttccaccacctccggcactaccacctcctccttcgctacctccgccaccttcgccacctcctccgcttccaccaccaccataacctccaccactactaccaccacctcctgatccaccttcatcgcctcctccccctttgtcaccacctccctttccctttccttttccctttccttttccacagtgatcggtatcatgatttagctggaatttcctaccactcaaaactgcataaaccgccacatttaagattcacgtaccttgttataaaagaaaacatgagaagagaaaagaaaatacttacggcttccctgcacttcatcgcatccactaaattcttcgtgaattccgtttgttcctgcagtttcatcaacaaaggtaatgattagctataaattaagatttaacttactacatgtcagttttacgtgtgtttcatgaacttaatgttttggaaaatggagtttacttatatcacttttataaacaatctttttgactaaattctttaacaaaatcaaataattgatgaacaaataaagtgcattattatcattaaccttaaacaagttaaggttcatacctttttcctcatctttcgatggctcaccagccaccaccgcagcgatgaggatcaccccatacagaaaacaaagcaaaataaagggcttcaacagattcattttgttagtgaacataacaacacttgagaaggatgaatgcaaagactcaacaagacccatatatatagtgcaagaaaagtattaaagtattgcatgcaacagtgtgaagcgggtcctacttctgaaccatctccttaatactttttggtttcttggcgtattttcaggccttttctctaactttaccttgaaaataagattatccagacgttacattgcacccagattcaaacctaattaaggaaaatggcaaggcacattgaagttcaagtataagatatttattgagatgctctcgatagaatcagttccatgccctattatccgcgcatcaaggttgaaactttcttctttaccattaatgaagataatgaagaacaagcggttcaataggcgtgttcatgttcttgtgacaccttgaatacgcgtgttcatgtaagaagtaagataccatgcccaacctcggcatgtcatctacataagcgttcttactttctttcaatcaaactcattgaagaagaaagagagagaaaactaaaaaggacacagaaaaggagggatcaaagagaagaaggaccatttatgggtatcatgtattcggtgtaactgaatttccatggacggtgcatgaggacaaagtggatgaggctagtaatgttcttaatttcatgaaattgaacacacgttatcaacacgtacgtgtatacgtgttaacaattttttttattacactctgtagattgtttgaaatttgaatgagttaaaatgagcttcactaactactgtatttgaaaaaaaaaaatcatttaacttaatcaatcattttaaatcttgaatacttaaaaaaaattattaacaaaaaattaattctaattttaaaatgaaaccaacttcctctttaatttttaatatcaaatgaaaaatggtttgtatgtattttttttctaaatttattatacttatacttatatttatatttatatatcaacaatttataagtttaattaatagttattttaatatttaattttataatcaatagtaaaaaaatgagtaaatattgaaataaagatatgatggttggatatactaaattgttagagacataagaaactactaaattatctgcatatatacatgaaagaaattggcatttgtaacttcttaaatgtaataattttttcaaatatttgaaattatagttgtaatgttttacgagtaatatttatgttacttaagagattttttaacattttatgctcgtatgttaaaaaacaataaactttttttataaaagaaaaaactttaaaatcattcttacatcgcgaggcacaaataaatttcgaaaaaaattgaaagaaaaataaggaaagtcctctttttaattcatttaaatataattttataaattatattggccttaattaaataataaacaaaatcatacatattttaattttaaaattttnnnnnnnnnnnnnnnnnnnnnnnnnnnnnnnnnnnnnnnnnnnnnnnnnnnnnnnnnnnnnnnnnnnnnnnnnnnnnnnnnnnnnnnnnnnnnnnnnnnnnnnnnnnnnnnnnnnnnnnnnnnnnnnnnnnnnnnnnnnnnnnnnnnnnnnnnnnnnnnnnnnnnnnnnnnnnnnnnnnnnnnnnnnnnnnnnnnnnnnnnnnnnnnnnnnnnnnnnnnnnnnnnnnnnnnnnnnnnnnnnnnnnnnnnnnnnnnnnnnnnnnnnnnnnnnnnnnnnnnnnnnnnnnnnnnnnnnnnnnnnnnnnnnnnnnnnnnnnnnnnnnnnnnnnnnnnnnnnnnnnnnnnnnnnnnnnnnnnnnnnnnnnnnnnnnnnnnnnnnnnnnnnnnnnnnnnnnnnnnnnnnnnnnnnnnnnnnnnnnnnnnnnnnnnnnnnnnnnnnnnnnnnnnnnnnnnnnnnnnnnnnnnnnnnnnnnnnnnnnnnnnnnnnnnnnnnnnnnnnnnnnnnnnnnnnnnnnnnnnnnnnnnnnnnnnnnnnnnnnnnnnnnnnnnnnnnnnnnnnnnnnnnnnnnnnnnnnnnnnnnnnnnnnnnnnnnnnnnnnnnnnnnnnnnnnnnnnnnnnnnnnnnnnnnnnnnnnnnnnnnnnnnnnnnnnnnnnnnnnnnnnnnnnnnnnnnnnnnnnnnnnnnnnnnnnnnnnnnnnnnnnnnnnnnnnnnnnnnnnnnnnnnnnnnnnnnnnnnnnnnnnnnnnnnnnnnnnnnnnnnnnnnnnnnnnnnnnnnnnnnnnnnnnnnnnnnnnnnnnnnnnnnnnnnnnnnnnnnnnnnnnnnnnnnnnnnnnnnnnnnnnnnnnnnnnnnnnnnnnnnnnnnnnnnnnnnnnnnnnnnnnnnnnnnnnnnnnnnnnnnnnnnnnnnnnnnnnnnnnnnnnnnnnnnnnnnnnnnnnnnnnnnnnnnnnnnnnnnnnnnnnnnnnnnnnnnnnnnnnnnnnnnnnnnnnnnnnnnnnnnnnnnnnnnnnnnnnnnnnnnnnnnnnnnnnnnnnnnnnnnnnnnnnnnnnnnnnnnnnnnnnnnnnnnnnnnnnnnnnnnnnnnnnnnnnnnnnnnnnnnnnnnnnnnnnnnnnnnnnnnnnnnnnnnnnnnnnnnnnnnnnnnnnnnnnnnnnnnnnnnnnnnnnnnnnnnnnnnnnnnnnnnnnnnnnnnnnnnnnnnnnnnnnnnnnnnnnnnnnnnnnnnnnnnnnnnnnnnnnnnnnnnnnnnnnnnnnnnnnnnnnnnnnnnnnnnnnnnnnnnnnnnnnnnnnnnnnnnnnnnnnnnnnnnnnnnnnnnnnnnnnnnnnnnnnnnnnnnnnnnnnnnnnnnnnnnnnnnnnnnnnnnnnnnnnnnnnnnnnnnnnnnnnnnnnnnnnnnnnnnnnnnnnnnnnnnnnnnnnnnnnnnnnnnaagtaacttccattaagaatatgtactggaattatataaaaataatccatttgatttgatatcttgatcataaaaaattatgagtgtattaggaatgatcaagaattatattgtttagagctaaattaatttttaagtcaaatttgaaattaatgtttagagctcaaattttaaaacaaaacaaattaatttttagtgactaaagactcttttacatggcaaaaatatttagtcatcgtatacgtagcgactgatttaaagacctattaggaattgaaactaaatgtttaaaaccaaaataaagttggtcaataaatccgttattgatgacccttaatttattcccttaaagaaaaaaatttagaaaccaatattttgcaccaattaaaataaattgagatcaatttctagttgttaatgaaccataattattttttatttagacattatatttctgtcactaattaaaatgtaattaaagagtgatttttcatttgcaaatgtgccttaaaatttctacacatcactaaccctctaactcactcatgaaaccaacactgtactgctgccactcacattcttcacttatcataaaatcacacttcacacatgttgattttcttccccttcctccgtaacgtacaaaatcatacgcatatgcatacacccatgacagcatgcatagattaattcctcctgcatttattggtttgctactgtgctcctggctcctgcatatatatgcttcctttatctgcacgagtttttgttgttgttcgtttgatgcatgaaagggaaagcgttgctctatttaatcacgaatttaaaagtgttatgtatatggctttagtttagtctattcagtaaaaagggagagaagcgtccacgttaggtttcaataatattgtaaatacagataatttaattaataatgtaaaatattaacaaacaaatccttaaaagaaaatatataaacaaacaatataaaatctttttatccttagccttaattttctgtcaccgtacttttttttcctttctttttctattttctttagaaagtttctaacttaaaattaaaacaatttttaattataaaactcttttttatccgtagccttaattttgtgtcacgttattttttccttttaaaaggcttctaactcatgaatacgttagaaaatgaattcaatgagcaaggcatcataataagaataagcgggtttaatagcaacatgaatatgaaagaagaagaaacactgtgacactatcacataataatcttaattattattgataaaataactctaattcaaatatccggaatagctctttatgccaaacccacgaggtcttggaccatacccaccattgggtccccctccataaccgccacctccgggtccaccaccactagacccacttccataatttccaccccccgatccaccacctccaggcccgcctccataactaccacttacaggtccgccaccacttggaccttcacctcctccaggtccaccactgtagcttccaccaccaggccctgcaccacctgcataaccgccacctccggatccaccaccacctggctccccaccttctaccgatccgccaccactaggccctccacctccactagacccatctccataactgccaccacctggccatccacctcctccagacccacctccataaccacctgcgggtccgccaccaccaggccctgcaccacttccaggatcgcctccataaccaccaactccgggtccaccaccacctggccccccaccttcttctggtccgccaccactaggtcctccaccatcgccaggaccacctccgtaaccaccacttggccctccacctcctccaggcccacctcctccataactaccaccaccaggccctgcaccacctcctggcccgcctccataactgccacctccgggtccaccaccaccaggccctacatcccctccgggtccgccaccannnnnnnnnnnnnnnnnnnnnnnnnnnnnnnnnnnnnnnnnnnnnnnnnnnnnnnnnnnnnnnnnnnnnnnnnnnnnnnnnnnnnnnnnnnnnnnnnnnnnnnnnnnnnnnnnnnnnnnnnnnnnnnnnnnnnnnnnnnnnnnnnnnnnnnnnnnnnnnnnnnnnnnnnnnnnnnnnnnnnnnnnnnnnnnnnnnnnnnnnnnnnnnnnnnnnnnnnnnnnnnnnnnnnnnnnnnnnnnnnnnnnnnnnnnnnnnnnnnnnnnnnnnnnnnnnnnnnnnnnnnnnnnnnnnnnnnnnnnnnnnnnnnnnnnnnnnnnnnnnnnnnnnnnnnnnnnnnnnnnnnnnnnnnnnnnnnnnnnnnnnnnnnnnnnnnnnnnnnnnnnnnnnnnnnnnnnnnnnnnnnnnnnnnnnnnnnnnnnnnnnnnnnnnnnnnnnnnnnnnnnnnnnnnnnnnnnnnnnnnnnnnnnnnnnnnnnnnnnnnnnnnnnnnnnnnnnnnnnnnnnnnnnnnnnnnnnnnnnnnnnnnnnnnnnnnnnnnnnnnnnnnnnnnnnnnnnnnnnnnnnnnnnnnnnnnnnnnnnnnnnnnnnnnnnnnnnnnnnnnnnnnnnnnnnnnnnnnnnnnnnnnnnnnnnnnnnnnnnnnnnnnnnnnnnnnnnnnnnnnnnnnnnnnnnnnnnnnnnnnnnnnnnnnnnnnnnnnnnnnnnnnnnnnnnnnnnnnnnnnnnnnnnnnnnnnnnnnnnnnnnnnnnnnnnnnnnnnnnnnnnnnnnnnnnnnnnnnnnnnnnnnnnnnnnnnnnnnnnnnnnnnnnnnnnnnnnnnnnnnnnnnnnnnnnnnnnnnnnnnnnnnnnnnnnnnnnnnnnnnnnnnnnnnnnnnnnnnnnnnnnnnnnnnnnnnnnnnnnnnnnnnnnnnnnnnnnnnnnnnnnnnnnnnnnnnnnnnnnnnnnnnnnnnnnnnnnnnnnnnnnnnnnnnnnnnnnnnnnnnnnnnnnnnnnnnnnnnnnnnnnnnnnnnnnnnnnnnnnnnnnnnnnnnnnnnnnnnnnnnnnnnnnnnnnnnnnnnnnnnnnnnnnnnnnnnnnnnnnnnnnnnnnnnnnnnnnnnnnnnnnnnnnnnnnnnnnnnnnnnnnnnnnnnnnnnnnnnncttcgcctcctccttgcccacctccgggttcgccaccaattgaccctccacctcctacaggtccaccaccaccaggcccacctccataactgccacctccgggttcgccagaacctggctctccacctcctccaggcccgcctccataaccaccaccactaggtcctccgcctcctcctggcccacctccataacctccacctccgggtccaccaccacttgaccctccaccccctccaggtccaccacttccaggcttgccactactaggtggtccaccacctccaggcccgcctccataactaccacctccgggcccgccactacttgatcctccaccgggccctcccccacctcccgatcctccaccaccaggcttgcccattcctggtataccacctccaggcccagcaccaacagggacaccccatccagggatgatactaccaaaaccaggaatgctccaaccgaagcaatttgacgttgaacagaccctaacaacgtctccatgacttggattttctctatatttcacatcactcacgttgtttttctctttagcaacttcacctacaaatgcatgaacgctgaccaaatgtcataatcacatatttgtcacaaaaataataattacgattaaggaacataaaacaagatttatcgtcaatgtagtccgttacaatgcaatgcataatcgaatttaattgcagtatatgagaattcaaagcaaaatgcaaactcacccgttgtagacattggggaggtctcagcaaggttcctagccgtcacgttagaggatataagagcaaccatggccaagaggcctagaatgagtaaggtttccttagaaaccatttttcagaacttaacaaaacaaacggaatttcaatgaatgtttgctaatgacgtatcgatttgaaaaacagtggggaagtggttctatatataggatgaagggagatagctggagttgagaaggatcccaacttgccaatttagcctaaataataaattcatatttctccaaagaactcaaaattcactcttctgatatcctactcaacgttattcttaattttcggaagtagcatttaatgttttttttattacttaagtagcattgaatgcttgatgaacatgactatgtaatgaaaatgaatacaaatattaaacaagtggttatcctttgtatcttgcattggttataagcatcaaagtcaacagggaaagataacttgcaatttgctataagtgcgtccttcagtttctttgactgagcaagaacaacatttaaaaagaataaatatcaaccaaatttaatttgctcaccccctttttcttaaatgaaatactattaaatcattataaaatttatggtcaagtttctcatatttttaatttcggccaaataaagttacttttaaatttaacaagactttcggaatcaaatataatatagacaatctttcagattaaataatgtatgtctttgaaagaatgtattatgtttttttctttcttaaagaaccacatgtatgtcattattctttattactttaaggaatacacaccaaccataatttcccctcccccccccaaaaaaaattgataaggacaagcatgtaaatttatatacatcacaaaagttcacataaatttaaatttaaaaatatagtgggatatcaattaaaaattaacgtgcatatatgataatacaaaaattaatgaaaaattaaaatagcatttaattttatttattattaatattatgaataaggcagtccaaaattattgattattaatataaactaatattgagctttaaaaaaaactataagctatttggctttggatttttaaaaattatttttaaataatttttttattgattttaaacctttattacttaaagaaatatacaccaannnnnnnnnnnnnnnnnnnnnnnnnnnnnnnnnnnnnnnnnnnnnnnnnnnnnnnnnnnnnnnnnnnnnnnnnnnnnnnnnnnnnnnnnnnnnnnnnnnnnnnnnnnnnnnnnnnnnnnnnnnnnnnnnnnnnnnnnnnnnnnnnnnnnnnnnnnnnnnnnnnnnnnnnnnnnnnnnnnnnnnnnnnnnnnnnnnnnnnnnnnnnnnnnnnnnnnnnnnnnnnnnnnnnnnnnnnnnnnnnnnnnnnnnnnnnnnnnnnnnnnnnnnnnnnnnnnnnnnnnnnnnnnnnnnnnnnnnnnnnnnnnnnnnnnnnnnnnnnnnnnnnnnnnnnnnnnnnnnnnnnnnnnnnnnnnnnnnnnnnnnnnnnnnnnnnnnnnnnnnnnnnnnnnnnnnnnnnnnnnnnnnnnnnnnnnnnnnnnnnnnnnnnnnnnnnnnnnnnnnnnnnnnnnnnnnnnnnnnnnnnnnnnnnnnnnnnnnnnnnnnnnnnnnnnnnnnnnnnnnnnnnnnnnnnnnnnnnnnnnnnnnnnnnnnnnnnnnnnnnnnnnnnnnnnnnnnnnnnnnnnnnnnnnnnnnnnnnnnnnnnnnnnnnnnnnnnnnnnnnnnnnnnnnnnnnnnnnnnnnnnnnnnnnnnnnnnnnnnnnnnnnnnnnnnnnnnnnnnnnnnnnnnnnnnnnnnnnnnnnnnnnnnnnnnnnnnnnnnnnnnnnnnnnnnnnnnnnnnnnnnnnnnnnnnnaaaaaaatcaaataattgattttttatttataaaaacattagtagtgtattaataatatttttatttgttaatcaatattcttaaaactcgtactcattaatatttggcggatatatttatcttcgactgctactaaatttacctaaaattgacaaaactattctataaagatactaataactccactcttaaaaaataagcgtaaatgatgttatcgtcagcactcaattaaatttcatgtcatgaaattaaaaaaattattaaagatactaatatcaaaaacaaaatatctatcctcttcgaagcccattttttaacattagtatttaagccaatggcccaaacttcaaatcagtcgaagataacaaccttcttgttgaacattccctttgtcatgacgatgtgaaagaagatggggcaatttttttttggaagaagtggaacaatttttttattatcttgatcttcgttcattattatatattttatgatattttttaaatgttattaaaagtttttaataacttttttattaaatgttaaataaaaaaatattactaaaaaaacatatatgtagtaatgattatgagtaactgggacaaggaggctttgccttcctccatgtaaggttctatatatagatttgttaatatgtactcaccactttcagttgcagtgtattaatatacccaaagtttgtgacaaaaaccccaacacatctcttattttattaatttattttaaggttattataataattaaatgttttaattttaaaattaaaaaataaaaccactttctgttcgtctctctccgtcgtttcggaattctgatccatcatattctcaaggaaaatttcagaggcaccatcaaggacctacttgaagaatacgataacacaaaccaagagagacaatggttgacttcaattttgtttatctagaataaggaaatgcaacattgaattgaaaattaaattacaaaggaaatgcgttcatggttattatgggatttgcaatggatggtgaatattgaataatcatcttatcattcttatggagacaatttggaagtgttattcgttaaaggcaaggagtgccatgtgttgttgggtctaattccaatgtaaatcatgaattaaagtagcaattagttttcacaaattcatcctcatgaatatttcatgggctgtttgaatgaccttttgtgataaacgtggcttgtttttgttggtgagatgcattatcatgcagcgaaggcataatggtaagacgcaaatatgggaaacggtgtgagagaaaagtatattggtgagaggcagacgtaacgacacgataagagagaaaagtgggaagaagatttattttcaatttttaaaataaaacattaaattactgtaatggacctaaataaattaagaaaatgaaaataagtggtttattttttgtctaatttttttatatataaaatgctaatacacaccaacttaaaaaatgatgagtgagtattaacaaatttcatatatatatatatatatatatatatcatgatagttattagtcgttaataattttaaattattaatgatattagtttttaataaatgaaagaatcattttaaattaatttgaaaaaaaaataaagaatttaaataatttttaaaaaataaaaatttaaactgaaacataaaattaagataaagaatcaaaagttatatttaaccaaacatataattaaatattataacttttttccaaaagaagtgagaccttggtgggagcagggataacaaaagtatacatactcaattcataacggatagaagatatatacttaaacaagtaactttatatattttaaacgggtatatgtgtacttgttaataaatgagagtataggcaattaagtatcatggtattagcttgcgtgtatccgttatagtaagaataattaaatttagtttctaaattgaagtattttgattagtataattgtatagaataatatttaagtaattttagttttttagcctttaaactatttttttaaataaccagttagaataattaaaagttatggttcaaattttcaattttaaatctttatgatgttgtttaaattttaaaaatgtgtttatttagtacttatttccgcttnnnnnnnnnnnnnnnnnnnnnnnnnnnnnnnnnnnnnnnnnnnnnnnnnnnnnnnnnnnnnnnnnnnnnnnnnnnnnnnnnnnnnnnnnnnnnnnnnnnnnnnnnnnnnnnnnnnnnnnnnnnnnnnnnnnnnnnnnnnnnnnnnnnnnnnnnnnnnnnnnnnnnnnnnnnnnnnnnnnnnnnnnnnnnnnnnnnnnnnnnnnnnnnnnnnnnnnnnnnnnnnnnnnnnnnnnnnnnnnnnnnnnnnnnnnnnnnnnnnnnnnnnnnnnnnnnnnnnnnnnnnnnnnnnnnnnnnnnnnnnnnnnnnnnnnnnnnnnnnnnnnnnnnnnnnnnnnnnnnnnnnnnnnnnnnnnnnnnnnnnnnnnnnnnnnnnnnnnnnnnnnnnnnnnnnnnnnnnnnnnnnnnnnnnnnnnnnnnnnnnnnnnnnnnnnnnnnnnnnnnnnnnnnnnnnnnnnnnnnnnnnnnnnnnnnnnnnnnnnnnnnnnnnnnnnnnnnnnnnnnnnnnnnnnnnnnnnnnnnnnnnnnnnnnnnnnnnnnnnnnnnnnnnnnnnnnnnnnnnnnnnnnnnnnnnnnnnnnnnnnnnnnnnnnnnnnnnnnnnnnnnnnnnnnnnnnnnnnnnnnnnnnnnnnnnnnnnnnnnnnnnnnnnnnnnnnnnnnnnnnnnnnnnnnnnnnnnnnnnnnnnnnnnnnnnnnnnnnnnnnnnnnnnnnnnnnnnnnnnnnnnnnnnnnnnnnnnnnnnnnnnnnnnnnnnnnnnnnnnnnnnnnnnnnnnnnnnnnnnnnnnnnnnnnnnnnnnnnnnnnnnnnnnnnnnnnnnnnnnnnnnnnnnnnnnnnnnnnnnnnnnnnnnnnnnnnnnnnnnnnnnnnnnnnnnnnnnnnnnnnnnnnnnnnnnnnnnnnnnnnnnnnnnnnnnnnnnnnnnnnnnnnnnnnnnnnnnnnnnnnnnnnnnnnnnnnnnnnnnnnnnnnnnnnnnnnnnnnnnnnnnnnnnnnnnnnnnnnnnnnnnnnnnnnnnnnnnnnnnnnnnnnnnnnnnnnnnnnnnnnnnnnnnnnnnnnnnnnnnnnnnnnnnnnnnnnnnnnnnnnnnnnnnnnnnnnnnnnnnnnnnnnnnnnnnnnnnnnnnnnnnnnnnnnnnnnnnnnnnnnnnnnnnnnnnnnnnnnnnnnnnnnnnnnnnnnnnnnnnnnnnnnnnnnnnnnnnnnnnnnnnnnnnnnnnnnnnnnnnnnnnnnnnnnnnnnnnttttttttttatcacaataagattacttttttttttcctttgtgcaactacctcttataaaatctttgggtttatcttaataattacaaattgtttaaaaaagtgttaataattaaaaatgtaaaattttaaaataatgttagtaaattagcttcaaatattaaatactttgtgttagagaaacttataaaaaaattcaaagaaaataaaaatggatacaaacttaccttatatagagataaagatacaaaaataaaacaaaaaacagaaagaagatataagaaagtaaaaaaagttgaaaggatgaaacttaaataaatttagaataataaagacaaacggaaaatttaagaaagaagaaaagttaacaattatataaaattaaaattctttaacaaaaaggaaagataaaccttttcgattcgttgcacagtaatactttttctttataaaattaaaaattaaaattctttataataaattcgtaactgaccaaaggtcctttgggcaaagtgaaccccagaacaacacccaaagatctttcaatcaaggtcatggattgagttctcactgcagacatcgaacaaatgaaccgacagttattcaatttaaccataagcctgaaagtcacacaaaaatgaaatcgtgtgaattggacatcacttgcgcttcataaactagttgaagtcatcgattattcaaacaaataagatattaataaaacaatttatataaaaaatacatctgattatttcgttagattctttaatgatgtatcaagtcattaaattgctaacttctcttgttataataccagttaatgttgttacttaataaaaaaatattaaaagtggtaaaaaagaaaaaattcaggaactttgacggatcaaaacttagattagagtctaataacatgtttggttcatgtctaacacctaaacatgcataaaagatgtggaaaacataagctattaagagttgcttctagtttgacgtgatagatggatgtacattatctttaatgtgatgctaaaccaaacatcagcataaatgcaaagaaatagtacactcctcccttttttactacaaggatcaatttttgaaaattaataaatctattaaggttttgggtcattcaaaggaacaacaatttcaaaccttgtgtttaagttattgggctttcggcccattaggagtttattaataaaatgaaattattttataccaataataaatatatttttagcaaataattaaattagttaaagttagtggtaaaatgtgtgaaataattatctatatcattattatttttggcaacttaaagtataataagaaaacaaccacaattttacattagaaataaacgtgtaagtggatagaaaatattttgtaaattaatgtctagaaaaagtggttctcttaagtataattttttatagaaataataatagaaaattgtaagtatttaagtatgctctgtagttacaacatagtctctgatctttgacataaaaaagaattattcttaatattatatagtaagaaacttagttaaaaaaattgataatttgcatcacctatagttattttttagaaaagttatactttttaaataatccaagttaagaatttagaaaagaagagatggataaataaattaaattaaattaaatctagaatttatgcataaaagaggttttgtatgcatgttttattaattacgcttataaaaatttctctgtgctctggaatattttgacaatgtttattatcattgtatattttatgatgattgctgtgaatataatttgaggcagaagtgtgatatatatttgtgatcactaagttagtggtcttcaatctttacgagatttttctaatagtatatgatgaataacaagtcataggcatcccgtgttaggactataataagaccatgctgtacgtagtgaagcatgattgcctatgtttgaaaataacagtttggtgcactgcgtgatgaaaaacatggataatcattcaggtttaatttttagcgtaaaggtactgagttttgaactgacagataaaaaaaaaaagcctcagttaatgtcttaatggtacgtgttagcgcccttgagttgggacaaatcacataaatcgacttggtaacggtgacccctctcagcatcacccagattggtgaaatgtacatacttgttgatgggttggaggatctttgctcaagtataatgactacaacatggatgtcagtaacttgtgccgggttatacgagctcccaatggttcctaatggttaagggtaaatcattagagatgagtatgaatccatacgtctagtagaggtttgtggttgagtcatgacaatttaggtcagaccttacttaggctcttgtattgtttgttttatacttgtatgttttaggttttaaaacttattgagaaaataaatgggctcgtgaaacctcattccttgttgcttttcttctgtatgtataaatgtgtatggtacaatgttggatttggctgtggataagaggaggaagaagtcgttattaaggatagtagggacgaaaaggacagaggaagacacttcaagacattcgcagttggtatgtgtaaagatatttgtgattaattgaaacaaattaagaaaaatgtaaacaaccggtgttggctcaaggcgtcacgtacggttaccaagtggattccatatgtttacgcctaaagctaacattcaaatacatgtaaacaagtcgaacaatatgagaactgagggccataatatgatagtttcaatcatcgctacaaataatttatagccacaacatttaaaattaatatgaacatgtttccctttctcttcctccacctcaagaaagcacataaagaaatatatgataaagaaaagataaaatttaactacaaagaaatgacgaagatatgtagtaacagtagaagtaaaactcacgatttagaggacaaactataactttgtgcacatatatcataattttaatcaacattttcttattgggaaataactgcagtgataattaacaaaggttagagaaaagacaggcctccttgctgactatatccatgcctctcataacacgagagcattctacgaaataatctacgaaagcattctaccaataaagatcttccgcaattatggacaaatgtatgtttatgtgaaactcatgaattctaaagatccttttcatgttcttgttatgattgaacatgatattatagattaatgctcacatgtggtatcagagcacggtttaagaatttgtgattttccattactaagttttgttgatgcaacaataaagtatttgaatcttaattttctgcttgttgcgaatattattgatcaaataatattgataaaataatatcacataattgttatttctcacttggtatgtcatatgttccaatggatatcacgataaagtcctgatggtgttttcagttcaacatatatatattaaatgcaaattatttttcctatcactacaagacaaagacacattaatgttagtgatgaaaagtaaacaataatgattgatcactttattgctcccctattcaaaattgtaccaatgcatatttaaaattgtatttgataaagtgtatatgcattgaagtgttgtgatnnnnnnnnnnatattttgttgacactgaaaattaattatgatgttagaatgtgtttgaatgttgttgaaatcttatgattttaacatattttgtattttatgaagtattgcaatcttggaattaaagtatggtgaatttgttagtcaccaaagtgaccaaatttgtatgagtgatttaattccaaattgtatgttcatttcaagtttggaattaagtacggtgaatttgttagtcaccaaagtggccaaattcttgataaattgaatagttccaaacattatgattatgtttcaattaccatgactgtgatgctattaatggtataaaattattgtttatgttgtggtatattgaagttcattattataggacagttaaggatcaacccaaaggatgattacttgttttataataaatgaacatgaacgttgataatgttgatacacttctagttttatttggacgtctaaagatgacaaatatttttagttggggtatgcatcataatcaaattatgtgaaatcttattagcatcattatagttgaatgttgtgtattaatggatccccaaaggtgaacattagtatacatttttatgatgtatgaatatgtgaattatgttcgtatgtgatatgtatgattcaaagcattaagttttcaaattttataccttgcaatacttgttgctacacattcgcttttctcaattattacagttttcaatggacacttctctgaatagaaagagcaaattgaattttaccttggggtaatggatttggatttggctcttagagaagagaaacctagtgctattattgatgcaagcactgagtatgaaagagttcattttaagaactgggaaagatctaataggttaagtctaatgtacatgcgaatgagtattgcaagcaacattaagtcaactcttccacaaactgaaagtgataaagaaatgataaaacttgtggaagagtgctcccaaactgctgacaagtctcttgctgggacactaatgagtacactaaccaccatgaaatttgatggttcacttactatgcatgaacatgttgttgaaatgacaaatattgcagcaaaactgaagtcattgggaatggatgtggatgaaaatttcctggtgcagttcatattgaactcattaccgtctgagtatggtcctttccaaatgaattataataccatgaaagacaaatggaatgtgcatgaattgcacaatatgttagttcaagaggaaaccagaattaagaaccagagaattcattccatcaattatgtcaaacatcaaggagttgaaaagaaagagattccttatgacccaaaccacaaggccaaatgaaaagtttgtccttatgggtaatagagtgaaatttccaatgaaagctgttgggacttaccgtttgatccttgacagtggacatcatttggacttatgtgaaactctttatgtacctagtatatctaggaatttagtttccatttccaaacttgataaaactggataatcttttaaatttggtagtagtagtttcagtttgtacaagcacaatcatttgattggcaatggtactttatgtgatggattatataaattatgtcttgataatctttatgctgaaacgctaatgactttgcatcataatgttggtactaaacataccttaattaatgaatgttccgcttacttgtgacataaacgtttgagacatagttccaaagaaagaattgaaagattggtaaagaatgaaatcctttcggatttaaattttattgatctgaatgtttgtgtgaattgtatcaaaggcaaacaaacaaaacacacaaagaaaggagtcacaagaagtactcagcttcttgaaattatacacactgatgtttgcggatcttttgatgttaactctttcaataaagagaaatattttatcaccttcattgacgattattcacgttatggttatgtttatttgctacatgataaatctcaagctataaatgctttatagatttacattaatgaagttgaaaggcaattagacagaaaggtgaaaattgtcaagtctgataggggtgatgagtattatgaaaggtatgatgaaagtggacaacatccaggcccatttgctaaattcttagaaaagcatggtatttgtgctcaatacacaatgccaggtacaccacaacaaaatggtgtatcagaaaggcgtaatagaaccttgttggacatggttagaagtatgttaagtaattcttctttacccatttcattgtggacttatgctctaaagattgtcgtgtttgtattaaatagggttcctagtaaagcagttccaaagactccttttgaactgtggacaggaaggaaacctagcttaaggcacctgcatgtttggggttgccaagcagaaattagatactacaacccacaagaaaagaaattggatgcaagaacaatcagtggttatgtcattggttatccagaaaagtcaaaagggtatagattttattgtcctaatcataccacaaggattatagaaactagaaatgctaggttcattgaaaatgatgaagtcagtgggagtgaaacaccacgtacagtggcaattcaagaattgagagtacaagttcctttgacttgtagctctagtaaagttgttgttcctcatgttattgaaccaattaataataatgaagaacaacaaatgaatgatcccatcgctcatgatgaaactattgacaatgaacccattgtagaagaaccacaccaaataacattaagaagatctcaaagggaaaggagatctgctatttctaatgattatgtggtatatctacaagagtctgaatttgacttgggtataaaagatgatccagtgacgttttcacaagccgtgaatagtgaagatggtgacaagtggttaaatgccatgaaagatgagttgaaatctatgaaacagaatgaggtttgggaccttattgagttaccagaaggatgtaagagagttggatgtaaatgggtctttaagaccaaacgtgactctcatggtaacttagaacggtacaaggctagactagttgcaaagcgattcagtcagaaagatggcattgactataaagaaacattttcaccagtttcaagaaaggattctctaagaatcattatggcattggtggctcattatgatatagagttacaccagatggatgtgaaaactgcctttctaaatgggaatttagaggaagatgtgtacatggaccattgcaagaacaatctagagtaatcctggtatgaatcattgaaaagctgcaaagaaagttctgagatatttgcaaggcactaaaggtcacatgattacttataggaggtctgtaattgctgcatccactatggaagctgaatttatggcatgctttgaagccatagttcaggctaaatggctgcagaactttatttcagggcttgaattggtcgacagtattgatagacagctgaaaatttattgtgataattccgtagcagtcttcttttctaaaaatgacaagtattcaaaaggtgctaaacatatgaaattgaaatactttgttgttaaagaagaggttcagaaacatatagtgtctatagagcatgttagcactgatcttatgatagctgatcccttgacgaagggattatcgcccaagacatttattggttatgtctgtagtatgggcattatgtcagctaatgaatgttgatcattattgaaattattgactattgacactctgaattcagtgatgtttaagtttctgaaaattatcctgttttcaaatttatgtatacatgcatgtatgaatgattattttgaaaaaaacaggattttgtccctaatgaagacataatagtattattgtgggacattatgatataaacttccattaaagtatcatattaggaagaagagctaatatagtggtacatggaaggaactatgccgatttgatagcatataaccgccatgactcttattggttttatttctgatcatgatttatgatgatgccaatgtatgaaaactttagccctatgaatgcgcattataattgttttcattaaatcatgaaatgaaatttatgacatgagccaagtgggagaatgtaagatttatcattgtggctcatttaaataaatgttatttgatttaatgaataaatgacataaagataattggttacaaagggaagttattaaaggataattgttaataaaataattatcttaaacgtattaaaaagataactgttaagatatgcagttacattaaaagataactgttgataggtgtagttatattaaacgtaatggttcagttttcttataacagagagatttagaaaactaaataccatcattgtctgcccatgagagttgtatccaatccctatcaaagaagatacaagaaagaaatggtcaagactctgagaaagtattctaccattaaaggatcttccccaaagaatctacgaaagcattctaccaataaagatcttccgcaattatggacaaatgtatgtttatgtgaaactcatgaattctaaagatccttttcatgttcttgttatgattgaacatgatattatagattaatgctcacaaagccacctccaccaacaccggggaagccgccaccgccaccagggaagcctccaccaacaccagggaagcctccaccgccaccggggaagcttccaccaacaccagggaagcctccacccccaccggggaagcctccgccaccaccagggaagccaccacgaccagcaccagggaaaccacctccaacacgagggaagccagcagcaccagcaccagggaagccaccacgaccagcaccagggaaaccacctccaacacgagggaagccaccaccaccaccagggaagccaccacgaccagcaccaggtaatccaccaccaacaccaaggttacccctgccaccagcaatggctaactgtaacacctccgaggagatcaaaaggagcatggccagcataggaactattgctatcttcgaacccatctttcactctttcagtagtaaactacaacaaatctactcaaattaatgagatatgtctggtaatgaaggatgagaaaattagtcggaaatatactctatatataggagcgaatgagagagaatttgaacctttctagagttaattaataacctaattgttctcgatctccagctcaatttccttctccaatttcaatggtaaagtgatgtaggttatgaaattgaaggacagtatttattgtgcgtaactacatgcatgcgtgtatgaacttcccatgtaatgcaaaaatgatcagtggacaacttatttgacacttagtgcgagaaagagataaaaaagaagtatgatagttgatataatatgatagaaagatagagatatagaaatagtaagtgtaaacttaaggagttggttgagcatagcataataagatatggcatttgacaagtagaggttttaatcttacttatctccttaggttcatgtaaatgtaagtatctttataaaagttctttgagttcaaacaccatctccttccataaaatttttactatgaaaaaagaaaagaaaattagctagtgttaaaagaagtgtttagagaaatagaatatccacctatcattactcaaaaaagtggagaagcatacacctagtactagtttgctatatatcttaatatttttctgatttaccctaaagtataaaataatttaaaggtcaaagttatacatttttgctgcaaagttagataaagttctttaagactaccaaaaatcaacaaattactaataaatacactaaagaattttttttcccttcctaatttgatgctaacaaatttttaaaaattatatatagattttattaatttaaattttttttacttgtatttgttatattttttctaaccagaattacaattttattttagtaactaacatttaatacaagtcagctgaaacttcattttgaattaaaaaaaaataacacaaaaaatacttaagaaatggcatgtaattaaattttttttcttaattaaacatgcttgtcaaataatacagaaaattgtatgtcaaatatgaaataaaataattaccatcgagtgcctagatgaaatagtgtgtacaaaagaaaaagaaacactaaaatgaattttacccattacaatatattttcttcaaaggttattttttaatattatccattgttcctattgaatggttttatacagtataactacaaaattaatatttaattaaagtggtaacttaaataaagtcttatttacccaatcataaaaaagtcattttacgtatataataacttaaaatagctttttatttatttatcataaatcatggttatgaattatgaatattataggtcaattgtttttttaattaaaattttcaaaatcctcatcaaaattagttactaaacattttattattactttatataaagtcctgtacggagaatacttatgtctggtctttcatccaccacttaattataatgttttagtctcaatggatgtcctaggctcctagctacgctattttgaattaaaaacaaaaaaattaaaaagccaacaacatgactagagttttcctttttgtcgacagaattgtgctgtagcctgtggctaagagctacggcgttcactaaatgaaattacaatgtgggaaatattatcatgtttttcttccattacgtacacaagtattttaaacttaattaaattaaacacatcaatacaataaattgttactaaaaacattgtatattattattaatcaatatcttgttatattaaatatgaatgaattaaagagagacatcttttaaaatatcgaagaggaaatatctttattaattaatatcatatcaaatttcaattttaaaatttaaatttaaattaggaatgattaagactttttctttttgtaataaaatcccgtcatgaaggcagtgcccattgcccactgttgttgactcaggttgctactcctagctagcccccatcgcatgacatcgatattggagggggaatgtaagagttgccacaaaagtttgcccaaaagagatatatattaattggccatggggtttagctatgcatgctataggtttcgtgatcacattccagaaaagcatatttcaacccacaactcgtcaattttgctgcacacaccttgcagggagacctcaatttttgtgccacgaaaaaaaaatatttacctgaatgtcacgcgatccaaaaattttactagactgtcacgcgcgtaattcgctggggaatgtagcgaattatggtaatggacacatggcacaacgtggcgtaattcgctggggagcccagcaaattaggtggccacgtggcaggcaaggggtaattcgctggagggcccagcgaattaggtggccacgtggaaaaaaaacgcaaaacttcaaacggtcataacttttgatagaaatgtccgatggaggcgtacgatatgtcaaaatgttcgaaattcaaagacgaagccctgggtaactcccaaagggaagttggtccaccattttttttccaaaaaatgtctttaagtgcctcaaaattaagatttaagagtcaatcgtccaaaaattcaattatttttctattttttaattatttaattagttaattcattcatactttttacttttttgattacttctcttaatttcgagcgttttgacatatcgtacgctttcatcggatatttttatcaaaagttagactatttaaaggatatatcgtactcttaaatactgattttgaggcacttagaagcattgtttggaaaaaatggtggaccaactcccctttgggaagtttcccagggtttcgtctttgaatttcgaacattttgacatatcgtacgcctccatcggacatttctatcaaaagttatgaccgtttgaagttttgcgttttttttccacgtggtcaactaattcgctgggccctccagcgaattaccccttgcctgccacgtggccacctaattcgctgggctccccagcgaattacaccacgttgtgccacatgtccatcaccataattcgctacgttccccagtgaattacgcgtgtgacagtctggtaaaatttttagatcccgtcacattcatgtaaatattatttttttttttggcacaaaggtcgaggtctcccttgcaggagccatagccggctgccctatatattcaagagcttgcccatccaagaggtaaggcttgattggactttctcaaaaacattgtacttgtcgatatttctagccctatggatgccaagagatcttgcaatcaaggtcctgaattgagggctcgcagactagcagcaagtgaacctagatttattgaaatttaccataaattaattctgccagaagccacacaaaaatgagagagcatgcacgaagaagatcacttgtccttggtccatagaggcctttcagaaaagcataacacataaaaatgataaaataaacaaatgagattgtggggcccacatttggagagagatacccagggccaacttgggtgttgtccggagatgcacccactactaaaagagtccaaatttctttttttaaaaattatatgtttgtgtaatattttttttataatttataattttatttttgtaaatagattgaaattattgttttatctctttgttgttcaaattaacaagtaacatgtgattaaaaagtattatcatattagttgttagttttttttttttaaacgtgctacctttataaattctcattgaatgaattgaatgaatttttttaacttatcatgctattttatgatcaatgtaacaaaaaaatatttttaatgaaattactgtctattttttatatgtaatatatatttattttcaaataattaaatacaaattaaaggactttatttagtgtttgttatggattcttaaaatcttaggatcaacactgaagatagttagcagttttttgggattggttcatgttcaactcatggatagtgagtgttaaacactccacacaacggataaaaagaaaagacgaaagagggttacaatgtcgaaggttcttgaatgggaaaagctctcaagctttgactcattctagaggaggaataacatggaaccccacacatgtacaccccatgtgttaaaatcgacgatggtgtacatgttggaaatgccaaactctataagggtttcctggatgaaatattaatcaattctgttataattttttttaggtcaattttgatccaatcatgtctaggcttagtctgtaaaagacaatatacaaattagacaccattgaatataagtattttctgtctaacatgctacatgcattgaggtagctagtgaccaaccaaactcaaatacaccttatgaaatgtaaggattgaactaaattttgagtatgaattaaatttggaccttttagcctagttccatcatggcttgatgtggccttaacccacaaaaagttggaaaacctctaatctttttttccattctattttgctctcactttagatcatttcatcgcatcgtggtgtaaagagtcttatattcttttagtgaacttttaaaacaaaaacatatgattgataacaagttttaaaatagaaaaaaaaaagcagatttactttttaaaatttgcaaaacttaaaacaaaaatcactccaaacaagacctaaatatttacactttaattaattttagcaatgcactctctcaaaacaatgtttctagctaatacattatcattaactaaaatttgttagaagttacaaaattttgtgagtctcaaacgatttttctaatacattatcaatattatcaatccactaatttagagaacaaaatcatttttatgccataatttgcttttaatttggattgtttttgtgtcatcaaaactgatgatagattccctttcatcaactgtggttgcagtgggtcgggtcccaaacccaagtaagaaaaatgataaataaaggaacggaaaaggaaagattattacctgagaaactttttattttgcttttgtcttttgtttgcaattttgcatggaaaactttgggatcaaaactccaattttcctttgccattcccttgaacttaaaatttagagtttgcaattttaccagtctttaaaattgaaaataaaaaaaaatgtaaaactcaaaacactactagaaaaatgattattagtgagggggatataaatttgtcacaaaattttttatgataaaaatatttaattagagagctttattcatcattaaatctaatttaaattgtttgtgacatattttgtgattaacaatattgagggggatataaattggtcaaaaacctctcgctagatgttttatatttatttatgacggattttgtgacagacaaatttgaaaagaagatatttcataacaaatccctagctaatatttcatatttgttttgtgaggaacatgtttaagagggacacaaatccgtcccaaaattaaataaatttctgtccatctcaaatctatatttttcgtcagaaaggtcatcactgtgagcaagggttttttcacctctaagattcatcactaattttgtttattttctaatagtgatacaaacctaattgaaacgggttttagtttttaaaatttagaacaaacaattatcccaaactcttaccaacaacatattagtctcactccttataatgaagtctacttacaattttataaattttaacgagtttaattaacataagataatatattaggaaaaaatattaaagagtattttagtaactctcctcttattgtaaatagtagaaataatatatccgatcacaaataatgtcattaaatatgataataaatgaatgaatgaataattatttttatcctgagagatttaaactcgtgataatttaatttattaaaataataaaattcttatttaatctttaaatatatataaaaatacaataattatgttttattgttatttcacgtaactattttgtcattaagctagctatagttggattttcttcatattttacatctgtcacgtcattttttctccttagcaacttcagttacaaacacgtgaaacatgaacaagtgataatcatatatatttgccatgaaagacagtaatcatgattaaggaacataacacaagtgttgtcatgagttaaataggttataatgcaaatcaccatttttcagaactgaaaatacaaaccgaatcaagttaataaatgtttgctgatgacagctgatgaaatatagatatgaaaattagtgaggaagtggctgtatatgtaggaggagggagatagctggacttgaagtgaactccaaaacttgccaatttaactttaacaattacaaaataaattcagttttctccaagtgctgaaaattcgttttcctgatatcacactcaacgttcttcttaattttcggaagtagcattcattgattaatttgatgctggtgtcaacgtaattctgtggtcaagtaggtaaattaatctcgaacgagtgcatatatatctactgtttgttgttttggttataactaataaggaccaaagtgaacagataaaggtaacttccgatttgctataaatgcttttttcagtttcttggactgagctatcaagagcatttttgtagcagtaattcattagttgtttaaaattaagcattgttaattaataagtttttatcattaaaacatatgatttgactatattgcttaagtaaattgtttatatatataattattacttaattcattgttatcaattaaaaaaatcattttttaattataaaatttaatatgacacaagttaaacacttattctaataactttaacgttaagagtaaatttttgtaaaatttctaaatatatatattattgtaagattcataaatttaagataaacaattcttttaaatagtcatacattatagatgttcttagaagaatgtttacacataacaaatatcaataatattaatttgctcaccccattttacttaaaaagaaaaattaaatcagaacaaactttatggtcaagttatttatatttttccaccaaaaaataagttgcttaattatatttttaccataaaatttctgaaacaaataatgttatagatattaattgtttcatatatataatgtagtctttgtaagactatgtgttatatatgtatgtgtctgacttcatataatgtagtatttgtattatatttatatattactaaaattatgtgtattaaatatttttaaaattaaacaataataagaaaataattaaataaaatatttatattttgttaattttaatttttatgaatgagttagataataattatatattaatatgaaattttatatatgtaatttatttgaaagaaaagttataaaataatataaaaatgatcaaaattatacgtatataattttatccctcctctctctctcactctctctgtatataaaggttttgcacccacctagtggggtgactgcgatctagggagggtaaccatagccagtgctagctcactgaattttgtatatattaataaaggaacaagcatagatttgctgtagctgcaatcaggttgaagatatggtaattataaaagctgaaacttatctacaaagaaataatgaagagattagtaattaacagcataaagtaagacacgatttaattaggacaaactaaagctttgcacacagtatattatcaccatttttaaatttgctcttgatgataacttgattatgtaggtacatgcgtacgtattattcaacattttgttattgttaaataactctagctagtggtaattattgagaaaggtcaggagaaaacacacccctccttgttgaccataagcatgacaagaaatttactgatgagatatagtaagtacgtagtagaactactctgtcatttgtgattcttatcctctttggcctgggaatccaccaccccttccaccagggaagccgccaccaacaccaccaggaaagccgccaactccaggaggggagccaactccaccaggaaaacctccacgtccgggaggggagccaccacgaccaccaggggagccaacaccaccagggaagcctccgcgattgggaggggagccaccacgaccaccacgggtgccaccaccactagggaaggtaccaacaatgcccgggaagccactaccacctccaccaggtaatccaccacgaccaccaccaccaacaccaacagggaatccacgaccaccaggtaatccaccaccaccacgacgactaggtaatccaccaccaccaccaccaccaagtaatccaccaccaataccaacagggaaaccaccaccaccaggtaatccaccaccagcacgaacagggaatccaccaccaacactagggttaccaccaccaaagttacccgcaccaccaccagcggctaagacctccgaggagatcaaaaggagcatggccaacaggcctagggtaggtactattgctatcttcgaacccatttttcagtactaaactacaacaaattaattaactcaaatgagatatgcttggcagtgaaggatgagaaaattagtggggaagtatactctatatataggaggagaggagagagaagtagaacattgctcttaattggcaccgtagcgtatattaatttagtcttttctagagtttattattaagtaataacctaattgtgctccacctccagctccaatagtctcaatggtaaaatctaggctatgaaattgaaggacagtatttattgtgcctgactacatgcttgtatgtaatgcaaaaagtgatcgctggacaactaatttgaaacttaattagtgagagaaagagataaaagaaataaaatataagtgtatgtaataaaaagatacagagaaagaaaattagtgtgttaaagaattgtttggagagataagaatattcacctatcatttttcgaaaagtggagaagtactagacatgatctagtgctagtttgctatcttaattttttttacaggaatcttaatattttatttatttatcataaagtataaactaatctaaaagtcaaagttagataaagttctttacgactattacatatcaataaattactaataagtatagtaacgaaaaattattattcccatacaagtttttaggttagtaatttaaatgacggactttttaaaatttatatatagattattcggtgattaattttaatttccttgtattttcagtattgtgatttttaattaaaattacaatttcattttggtaacttaaatgaaattttattacaagtcaaatgaaactttatttttgactaaaaccaaatcacaaaaatacttaagaaatagcatgtaattaagttttgtcttaaataaaattatatgtcaaataacacataacaattgcatatgtcaaatacgaaaactgattaccaccgagtgcctagatgaaatggtgtggacaaaagaaaaaaaaaactaaaatcaattttacacgttacaatatattttcttcaaagtgtttttttaacattctccattgtgattcctattgaaagtttttatacagtataacttcaaaactagtaatgtttatcaaaataataagtaaactttaaaattaaaatttagagttgtacctttaattaataaagttgtatttacgtgatcttaagaaaaaaaaggttgtatcttttttggtacaatttttttagttttatttacgtgtataacttttacttactttttaacataaaatcatggtgatgnnnnnnnnnnnnnnnnnnnnnnnnnnnnnnnnnnnnnnnnnnnnnnnnnnnnnnnnnnnnnnnnnnnnnnnnnnnnnnnnnnnnnnnnnnnnnnnnnnnnnnnnnnnnnnnnnnnnnnnnnnnnnnnnnnnnnnnnnnnnnnnnnnnnnnnnnnnnnnnnnnnnnnnnnnnnnnnnnnnnnnnnnnnnnnnnnnnnnnnnnnnnnnnnnnnnnnnnnnnnnnnnnnnnnnnnnnnnnnnnnnnnnnnnnnnnnnnnnnnnnnnnnnnnnnnnnnnnnnnnnnnnnnnnnnnnnnnnnnnnnnnnnnnnnnnnnnnnnnnnnnnnnnnnnnnnnnnnnnnnnnnnnnnnnnnnnnnnnnnnnnnnnnnnnnnnnnnnnnnnnnnnnnnnnnnnnnnnnnnnnnnnnnnnnnnnnnnnnnnnnnnnnnnnnnnnnnnnnnnnnnnnnnnnnnnnnnnnnnnnnnnnnnnnnnnnnnnnnnnnnnnnnnnnnnnnnnnnnnnnnnnnnnnnnnnnnnnngcatcatggttatgatatatatatgaatatgatattatatataggtaagttagtttttgaattaaaattttcacaatcctcgtcaagattagttagtaagcattttattattattttatattaagtccagtacggagaatacttatgtctgatctttcatccaccactcaattaatttttttatttttagtctcaatggaagtcctggctacgccattttgaattaaaaaaaaaaaacaataaaagttaagaacacaagttttccttctagtagacagaattgtgctgtggctatgagctgcgccgttttccaaggtgctaacgtcaaatgaaattgcaatatgtgggaaatactatcacgtttttcttccattacgtacacagttttttaaatttaaataaaacatgtcaggaaataaattaataaaacattttatatttttgttattaataatgaataatttgttagagttattatgtggcaccccgataaagagaaacatcttctaaaatcgaagaggaaaatctttattaattaatatgatatattaaatttaattaggaatgatcaagacttttcttttttgtaagaattcaaaatgaaaagaggaactacaacgtgacaacaggaggcatatccctccccaaagtctctaaaatcgtttcatggcggtgcccaccatcgacattggagaatgcaagagttgccacaaaaatcatagccctaaaaccaggaatgtatgctttagctataggtttcgtggtcacattccaggcaactatattttagcatctgatatccccgtttttgaccaaattatagccatgcacaactcgtcaattttgttgcatgcacacaccttgcggcagccagaattgcatagggtataatggaatggaggaaatgactgatttagtgagccataggctgcctgctctagtcaagagattgcccttccaaaaggtaaggtaggattggactttctcaataacattcttaaagtctgcctagcttattggtcaccggccccatttgttaacaaattattatggtattacgtactcctttagtcgaactagatggtcctgtatgggaataaggaccaaaagggtcttgaggaggctcgaatttaaaaaattgtcagtgaatgctttgcgtactagatgccaattaaggtcaattgccaaaaatgagtaagtgtatggcttgtaaaagaaagactgaaaaccatcccggttaagagccttaaaggactttatttacatggttgcactcttaacctcctcttttgtgaccgaggccagtagtgcctcttgcgcttcttgctcagttaagaaatattaccaacatgcaacaggggccaagaatgttattagaaaaaagagatatgaagtgcctaatggctttctattataaaacatcaaaatttgtatgtaaggaacctttctttagaaagagatcaaagatcttatattccgcattcaacgagagattgtttgggcattaaaaaaaatccagtggtctttatgaggtaaacctgtgtgctacaacacaaaaggtctaaaagataatagtagttacgtctatttgaatataagtttttttataaatacttctaacagaagaaaataaaataaaaaaaataaaatgaacttctccataagttaaaataatttttcattaattaatttatagatgtcatctcatcttttaaaaaagttatattgataaatttctaaaaattaactaatgaacaacttatttcatctttttttttttagaaatacttctaaaaaacttactcaaacatgtcatcggtcatattaaaaaaaatcagaagcttgttgtgggggagaatttacctcctcgcacttccgataaggttttgtaatttcattaaagttcaaaaccataacctcgggcgcctaataaaggcttcgacgaatattagtgagatggtcccattgagttaagctacttgtagataaaaggaggcaaacaccgtgtagcacacccaagtcaatgtacctttaattgttgacctgaaagtagatggcctgaaaagaaatactcacttcttttgtagtaaaggtttttcttttgtccaaatgcaaaacacccaaatgccaccagcattgccctgggcttcaaccagatgacaaacattaatgtcttaaaaaaaattctagaatgactaagctaatgaaaatgagcaatggattaccatataatgatgaatataggatggttatacctatgactcaactcatgaacctccgaaaaccgttttggttgaatttattatttttcttttatttcctcatttttttacttttttttttaattctttaatgagcttagtcatcattttgaactccaaattgaatttggactttttggcttcatgtgttatagtctatgacttgtgttgatactttgaccaacctaatttaaacacacctagtgaaaactaaggcttaactttagattatgagcatgaactaaatttaggtgtttttagtccgatccaatcacttaattcgatatgggcttatcccataaaaggctatacaaatgagacactatgaagcctaaattgaatgtgagtttttttgcctaacctgttatagcttgctacatgcattgttgtagtgaccaacctagcccaaatgcgccttattaaaaataaggtttgaactttaaattttgagcataaattcaatttggtcattttagcccaattccatcatagtttgatataatcttaacccacaaaagttagtaaaagccttttatttttaaaaggaaaagttggtgaaaatcttaaatcttttctattccgttctattttgcacttactccatatgatctagtcacattttcatataattaaaagtctcacattcttttagtaaactttcaaaagaaaaatatagactgataacaagttttaaaaattgaacacaagaaaatttaaatcaaaactaaaaactaaaaagtagtcttagatttttaaaagttttgaaacttaaaaccaaaaatcactacaaacaaggcccaaacttttgatttatatagtatttttatgctttttattctaagagaaatgtcaacaatacaatgtcttagcaaaattttcctaatacatacgttatatcaatgactaaaaattataaataaaaaaaattagtttcatttcttgtttttttttttattatatcacaatgagtattcattagctttgttttgcttatgaccatctacattcgagaatatgtctgatcatcattagtaaatttttttttttaaaattaatcatatttttttcatttataatacttggattcaaaatcttgttcaagggatctaaattcaacttactgagaccaatgacatattagtaagcttgctctttatttaattaggtcaacttaattttataatttttaactattaaaaatgaatatattagagtgttttagtagctagctctcctattattataaatagtaggaatagaataacactgaagacaaatgtcattgaatacgacaataaatgaattcaacaagccagcaggcattaatataatatgggtttaattgcaacattgaagcccaagtaaagaaactttattatttagcactactacaaaagcatcattttacgacgccaaatcaaagtcggttatcacaaaatcgtcgtcgtaagtggagcggtggcatttttgtaaatagtttgccatgtacaaagtcagttgtcaaataaccatttttgaaagctcaatacaacacgttttttgaaataaccgtcgtggtttatcagtgctaatttgtgttttcaaaataacaacgatgggtatggtataaaaccgtctttgttttataagcccaaaactcaaaacgacgccggtccacttgaagctaatttcatttggctgtgtgtgtgagcttagttgcccaaatttcgggaagccctaactaagcaagccctacctataggtaaaacgatcaccgaaggtggaaacatttccactactttttattcagaaaagtatcatacaatcacataattaacataattattgttgataaaaccacactaactatggccttcgggatgactcttaacgccaagcccaccaggcattccaccatatccaccacctccaggcccgcctccataaccaccacctccgggccctccatcataaccaccaccagacccaccaccaggcaaaccgtttccaggcccgccactataacccccaccaggcaaacccattccaggaataccaccgccgtaaacgcctcctccgggtcctccactgtacccaccaccaggcaaacccattccaggtataccaccaccgtaaccgcctcctccgggcccgccaccataaccaccaccaccaccaccaggaataccccatccagggaagagacgccccaaaccaggaatactccaactcaagcaatttggtgttgaacagaccccaacaacacttccataacttggattttctccatatttctcatctctcacgtcatttttcttcttatcaacttcagctacaaacacatgaaacatgaacaaatgtcataatcctatatgtttgccatgaaaacagtacgtaattatgattgaggaacataaaacaagttgtatcataagttacaatgcaatacatcattaattgaatttcaagtttgtgagaattgtaagcaaaatgcaaactcacccgttgtagacattgaggaagtctcagcaaggttcctagctgtcacgttagaggatatcagagcaaccatggccaagaggcctaggacgagtaacgtttcctttgaaaccatttttcagaactgatgaacaaaagaaaccaaatcaaataaatgtttgctgatgaaatatcgacatgaaaattagtgaggaagtggctgtatatgtaggagggagatagctggagctggacgtgaagtggactccaacttgccaatttagcctaaatataaattcagtcttctcccagtcctgaaaattcgcatttctgatatcacactcaacgttcttcttaattttcggaagtagcattcattatttgatgcatgtatcgatcaacgtaattctatgtagctaaattaggttttaatgtcaaacgagtgcatatctactgcatctttttataatttataagcactgatgcatagcgcgtcacgacatttttgtcaaattccatcgattaggggattaaaaagggtatcttattttgtattgtaattctaggaatatttgtaactttattttagaaattttttatattttgttttttaatttttttttacgtatttgttcatatatcttttacactcactctcacacacacacatagtttttctgagatatggaatgaatttctgttgtatgcatagcatttctagtgggaaacctaggatatttttttaattatgatgatgatatatgggatttgatttcgtgtggttgctctcacctcaagacaagcattggcttttgactgtttctgagggatgttatgtatatactttttattgttgtgcatgtctgattatcaagttcccaagaaacacattaatttctcattcagactgggtgatattttttaattaatttatgtatgtaaattaattgccagtaatgatctttatttgtgccattgaaaagatcaagtgggtttaatatgaagattctttctgttgaataaacttaaaatattagttttaatgggtttaatttaataattttattttagaaaaataaaatgtcatgagtcaatgatgattgtagtttatggttatgaatgactataataaattttgattgtggattatgattattaatagaatttaagtcttttaaattcttgaaaaacatattatagcctataaatagatcattatattgtttgacaaatagagagaagaaaaagaaaaagaaattgaacaaaacttttctataagttgttttctccacaaactctcacaacataatttttttctattttaaagttaaaattgtcagcaagtgcattttttccatcaaaatggacgtgttctgatgatccagaaaggtaacaagagtgatcaattctcttaattctcataggcatttttggtctcctatgttatcattagcttcttttttccccctcccttttgagctgcaaatacacagttgaaattattaagctttcccgagtgaataagaatgtatttcataattaaacagttagtatggatagaaagtcatccttgatgttcaagagggtatctttctgaaccttagatacatctagctaacatgtacatatgatttttctttcataatagagttgcagtatataaatgtatgacttgctttattttggattcaactaaaagtgctatggacaagcattgtatacatggggtatcttgcactgatatttagactttggaaggaaggtttgttatttaaatatgattcttctggtgatgtttttgtgatatgaaatatttacctatttcaatttattgtagtgtagagcactctaggtaacacatccttccctatctaggatgtggttggcagaagagaaagaaaatatagtaagtggtagaagggtttgaaaaaatgcactaccataccatgcatcatgtcaagatacattgtcaattttcaccctcttccctcaacttagctcatgtttacttgcacaaggcacgtgattaatttatcaatctaacaaggctgtcccacataatcatttactcaaactttataaacctatgttagcatctttggaactattggatttatgcggaagcgatttaagaacctagtatattggtatgtttatcgaatcatcattgtttcataaacacacatggaatattacttctcggaatactaatctttgatgatctctcacgccttagaattcttgcgtcactgattgatctccttgtagtctgttgatgacagaccttccagactatctctcaagggggaaagggatagtgtgtgtgcactttctcactatcaagagatgaccttgcctcagcctctgtaactgtcatctttttctagagagggttaagtgtagtatatatatgagtttctaaaaaatttaacccttaggtgttaacggactctacgtttttttggactctttttacacactaggtcctattgaactttagtgaaagagcaaaaacccaacatgtaaccaatatattagtgcattattttttatttataaaattctctatgctgccagatcttcttgtttagctgcgcaagagctgatagcagagcaacttgagaaattgctacctccttgtagtttaggtttgaattgtttgattgcttcacttgaaatatttaatataatgaattgcaacattaggaagaattagaaaattgtaatttcttcttcagggtattccattcatttcaatagaaaattctgcaagtaaaattgcattttctacattattggcgtcttaaccttcaactgtaggatgatttgatattgggaaaatctcccctttcttttgttctatatatatatatatattaatctaacaagattttatcagtactataggactttcaaatggaattttaaattttaaaagtagatatgtgaaatgtttcaaactaaaagtaaaagttgaaactgaaagtacgattagatgtgcagtttacttagttttaaccataccattttgcccgttttaagctgattagttaaagcataagatgttcaatgtttgtttttgtttattatagaacataagatgtttactgtttattcatttccatattctcaattcgaaatatattaatataatatatgtgcaatctacctagtctccttaatgaaaaaaatatttatcaccttatttgacttataataataataataaaaggtgagtcagttggcatgtgaaaattcaaaggagtatgtaaacctttgcacatatttagtgtaacgccatggattatttatcaaagttcaatttgagaacttatataaaaaaggcaccaattttttttttatatatatgattgtatgagtatttatattaattgttaatagaagtgtcttaaaaaaatttgaagcttttaatgtgtattttaatattacaggagggaaataaagagaaaaatatatcatatttttttattataaaaaatgtcattctacaccggttatgtaataaacgatgtagaaaatgactacaacatcggttataggaaaaatcgatatggaaaaataaatttcttgtaagtgttatacaacatcggtttgaaaaaattgatgtagaagatgtcatttctacatcggtttttttagaattaatgttgttttgaaccttacaacgttgattttttaaaatcgttgtttcatttttgcatattttatatattttttttgtttatttcttatcatacgatattgattttcttaaaaattgatgttgtgtagtgtatgctaacatcgattttttcaaaatcgatgttaatattgatacttttaaccaatgttatcaaatccggtttggaccgggaccctatggcctaaccaggccggttctactttcagaccgattacgcaattgaactggttaatcccggctgagttggttacctaatctcggttagaccgattcgatcgaccaaattttttaaaaaaaattgatttttttaattaggattttggagtatagatgaactctttttattcaaataatgttagttatatacttatatataatagatacatatataattttgaatttttaatatatagcaagtcaaactggatcaattattggtccaccgattggaccattgacccactacctcgatcgaatcaatatcagcggaccggatttcacaactatgattttaatgccagtgttttcaacattgattaaaaaccgatgttaaaagtctattttataataatgcaacacttatttatttttatcaattcatcaacaatttttttttatcatatcatatcacctatcatatttatattttttctcttatttcactctctctagtgtcaaataacttttgggtatcaaaaaataattttcattttagtcgttgtaaaatgtgtttgatttatttttttacttaaaacgttttagataacactttaaataataataaacattatctaaaaatgctttaaagatggaaaaacaaaataaatatattttaaaatgacaaacaatttttttataggaacaaaaatgaaagttaatactaaattaatgaaaaagatatttaaacctcctaatattatatccaatgccattatcaccacgtctagagaagccaccactcctagggcgttcacgaatgcgttcacttaggtctgggcagcaatgtgagcaatgtccccaggctgtgtcctccccaccacagccacaacgaaaattccctatttctctattagggaaagggaaacccgcatgactaccaatgacaggccaacaaccaacaaaaatggcatcgatcacccgcttcattagtctctttgacaacctcacctgaaaacacattaactctaaacacgtaaatcatttacgatagaaagaaaaatgataaataatataaggagatagaaaaagatagaattaaagtgaacgtaaaagtttaagtataaaaaggttgaatgataaattgataattaattggaaataacatacaaaatgctggaaggagatggggagtcctttatgatccaccgaattggaccaacaacccattgtattgtaaacaacctttaaattaaagttctagtaacttcttaaggacgtgcttggtgggtgcatgctatgacaatgcaacctttcttcagagggtttgcttactgagggggctgtgaagatccaaaaaagctagctttgcggtggcagaggaatctcaacgtgcagaggtgaaaggcttgtgtactttgttattgcaggatattgcaactccttcgtggtggctgatggatatggtagaaatcatatatatggtgtatttttgtgcagctatatatgtatttgattggtgggggagggggatattctgttgtgtagatcaatgggtaattattcatcatttaattgcacctttgcttctaaatgattgtttaacggattgctggtgggtttttgttcatcatttgtacttcttatgggtacatctagtacccttctttattgcaatatataattgttttgctgataaaaataataattaatagggtatagtatattttgtgtgaaatgacaaaataataattaatatataattcttatgggtacatctagtacatctagtcatttctttcttttttgaggttttctttacaatttgcccccaataatgtgaaatgacaggcaggaaatggttgtaaagagcatttttacaatatatatcttaatgtgtgttcctttcgtgtagtaaaataaaaagaaaattacagtaacaacgtctcatggaatttgcactagttacatatccatcccctctcttactattatctccattttaacaataattggttttctccgtctgcttcatcgtgatcattaacatacatacttcatcttttagcatgatcatgcatatcttattagtaagcatattacttacatattcaagagtatcaatcacattcacattttcggtacttaatgacgttgacagattgacatcgaattattaatatacagcaagaatataggttgcatttttatttatctcaaacatttagcaacagtctggaagggtattttttttgggacaagataaaagtatattgatatgtggagtagtcccggacggatcgatccagagatacatcaaagggagaaagctgattttttttttacacagttatttaaatattaagtttgtgataaataattatttaataataaatttcacaaaagttttactattaattgtatttgtaaaattagaaataagatctataatgagtaaaaaaattatcaaatcaataactttttttttttaaactaagaaagtgttgagggagaaaggaccctgcctgctccccttctatccgtcccggcccctaacccaattacataaggtactgcatgttttattatatataataataatagaagcaaaagtcacgattttaaaacaaaatatttgcactgaagattatttcaatttgctcttaaacttgtcacacaggcacagtgacgtacgtattattctacatcatttctacttgagaaaagacaagcctctttgcatccatgcctctcacaacaagagattttattcatgaaataagcacccatgccatgtatggcggttaccattcatgctggcagcaacttaagcaacctcccaaagacgacggaaaacaacagcctctcatgcaataccctcctcttccatatgtagggggtttgccaccaccccattgcccataatcataaccaccaacatcaactaatttgccatgacccacttcatttttctcttgaacaacctcgcctactgcaaacacattaattaaatattaacacatgcatgaaccatttactatatatagaaaaattaattttgcacacccattaattgggtgtatatatatgatttgtgagggacgagaggaagagaaagaaagcaccaccaccaactaatttggcatcagtcacttcatttgtctcttgaacagcttcacctgctggaaacacatcaacccttaacacgtgaaccatttactatagaaaaatgaaatttgcacacccattatatatattaggtgtataattaagatgggtttaaatactcttgttattagccttttttttctttattgctgaaaaaaaaatccaaaatgctctttataaaacctttatttttggtccattttgtttattattaattgcttaggtcctgtaatattttctttattttgaattagtccttataaaaaatataatacagactgaaattaaagcaaattattcagatattacaacgacaaaataatatttaagggtaaaaagtgcaaggataaaaagtatacaaacggggggaaatatttaagtcaaaaaaatttataaaatggttacaacaaaattattttagaaaaatagtattttaaaaaaaatagctagtgtttttaaagcctttattaatattctattatttgaaatgagaaccatataagttaaaatgatatataacattataattaacttgccctcttttaaattcctggctgccacttctgaggagatcaaaaggagcatagctaacaggcctaggatcagtatagccatctttgaacccatttttcagtactaaataaattacaacagatcgagtttgtttagtaacgaaagatgagaaaaattgtgggaatgtatactctatatataggagttggaggaaggagaagtaggcaaacctctctcttaacatattaattcagaattttcaaaagtttctaactgatttattattatgtaagagtaccaaaaggtgttaaaataattgtaaccgaccattctatgatatccatattttatcagaaaataatcttattctaatattaattcaccaatcaccttaatgtcattgctgttagaatattacttaagcaagcatgaaacaaagcttgtacgtcagtgttgtaataataaaatctgagaatcacaatagctaataaatattttccaggcaacatgataataactagtattgatgatattattaaaataatagttgtaataactaataataatattatatacctttaatataaaaaatgcgaaagataggaattttcaattccgaaggattacccttcagtttgagcaaaaggaaattatataacaacaaactaagaaaagaatcttaaaagttaagttatatctttctatatacttaatatatatatatatatatatatatattaattttttatatcatcaaatggctaacaaccattcgacattcataaacgctgcctataaaatctgaagttattttaataaatcatgacgcactaaatcagtatattaaaccattacttttttctgatttgtcgggtgttcttttaaaaaattcagtgttaaattgtgcttagtttaattgaaggttattcgtaaaagaaatatatattttatgctactttttgaaggtcattattaaaatgtttaaaattttgaattgaattgtttagattaattatgcatagttttagttttaacttttttacacattttaattttattagaatgaagactttaattttttttaaaaaaatcctccactgcctcaccctcaagtcgacatctccatcggtgatttctacaaatgtaacattgctgctgcttcaatttgtttaatgatattggcaccttaatttgcggttggtctttgtattagacgtgattctgggagttttgttttggctaaaccggtgttgcaccaaggctcacccccagcacatgaagcagggtacatgagtcagtttgagttgagttttgttaaatttgtgatacaatttaattaaatttgaatgggtttaggttattttttcaagaagaaaaaaaaaatcaactcatttataagtagtttgggttgagttggatcaatgagtcaaaatatttaaatttatcaactatttttaaaatctaatattttttataagttaaattttttattatatgaaataccaaatcattatttataattgttacatataattaaatagtgggaaaaaatgagagaaagaatcacattattaccaccatcatcatataggctagcatattatattaaacatgattaaaaaatttaaatataataaacaagaaacacacccaccaagccaaaacaatcccaaaaattaaaattattacaatatagtttgataatttcaatattctcaattaactaaaacttcaactaaatttaaaatagtttgaaataaattaaaaggtagaataaatattctataactaattttgctgtaaagatttgaaccacaaaatttgaaatataatagtaattaattttataaatttaaaaaatatattatatattataaatagaaataaataataataatttaaatacaaattaatagttcaatgagttggatcaacgtacttgttcaaatattaaaatttatgattcaatccaaaacttaacgagttcaaatgatttgagtcagatttaatccaaaaaaaaaaaaatcaatgtaaattatttagattaatttaaattaattcagattcacaaattatccatattgttgaacatcctgcatgaagcagaagccattgaacggttggaagttgctataattggctcaaagatcttaatttggacaaagttactttcgagctagacaacaagtagtggatgatttgaagtcatgtcatttccgttaacagaatttgcagctatttaaaaaattgtaaaaatattgtcatatttgcaaaatcatgtcattgatttaagataaatcaatcatgttgttcatctttcactatagcatcaaaatcttttgctagcctctgttctccatttgattccaaattgtattgagattcttattataaatgaaatgatataagttacttttgataaaatttgattttggttgctgtctttttaaattgatgaatatagtcatccaactttgaaaaaaatacatgaatttagtatttcctccaatttgttgtgataaaaaatcatcactaaatattaaatttaaacatgtagaggaactaaatttacaactttttttaaaaaaaaatagatgattaaattcatcaaattttaagtataaagaccaaaattaaatcaaatttaagcgaaagtatagaaatttaaaatatattttttgcatataatcgtaacagtgactgaacacctaattttgtgtgagtaataaacaccaaaaataaaaaataaaagtaaagaaaaaaaaagattagtttactccaaaagtataaaagttattcctcatctttattatttattttttaaaatctaataattctataatgaataactaatcttaatcataccacacaacttttggtaagaagtttaggactttttcctttagcatcgtttgattttgctagaaggcctcgccctcaccaacaggtcatctcacaccagaaactggagtttccctcttacccaatattccctctaatcaatggtgacattaaatgaaatagattgaaaactagttttagaatatatcacaaaattcatttctttagttttagaatatattattatttaaataaatttaaaacttatttgtaaagaaaatagtatttttaaagtttaaaaaaatggtgtatttgtaaaaaccaaagtataaatataattaataatcgcgcacattcataattttccaggtagagattatatggtttgggcaatatattgttatttaattacacaatctaattttactatttttttttttcagaaatatcatatttctggagaaacctttccaacatttgttagaatttgaacacattcaaaatacttttaggaagtgttaaatgtttaacatttttcggaaattgctttctcgagaccattttttaaaaaagaatagaaagaaacaaaggcaccaccaaaggggtaaactttgcagttttgggatagtccgtgacagtgttgcagtgaatttgaatgcttgtcatcattgtgattggagtatcatgcattaatgggattcatgtttctacgatctcttttagaatttcataattttttttttagctaggatttattctaaagaaatcaaggaagtgagtgtatcaacctatagcaaacgtagagcatcttaaaaggcaattagtgtccttttttttattattctaaaaattggtttctgaaaaatattctctagaatgtattaaatttttaaaactttcaaaaactactttcgaaatgtgaacattttaacaattccaaaaagtagtttagaaaaaagatatttttcaatataatatatatatatatatataatattaataaaattagagtgtaaataacatttttttttctttcttcgttgttttcggccttgatgctggcaaattcatagctttggcctatattaagccattgtccagctatagattttttttcttctttcattcatttgttcagccttgatgaggtgatgtgctgatattggcttttttttttctttttcgtttttctaagaaaaaggttttattatagtatactgaaacattttttttcatagcttttaaaattgaatcaaatcgatgagtttgacggcaaccagcttgttaaccaatacaaaaaaataagactatttcaaaattagttagggcccatcaagaatcggtcaatccagtcaagaaccggccaatagtaaactcatattttattttaaatgggattatccactttcgtctatatatagtagtactctctaaatccgtatactaataataatataatatctataatacaatatctattattataaatttatatagtaatgttgcaatgctaattgaaaaataacattgtaatattatttacagttaataaaaaatatttaaataatatatcaataatatttttgttactatttacatgaaaagaatgttttattataactattttattattgtctacacaaaattaaactgcttttatcttgatattttatttataactaatctagtaatgtatgaaatatcttataaaaagtattttatatgaaaatgagaggatttaatttagatggtataattatacataaaaaaataaaatttaatatgatgtagaaactaaaaaaagtcatatagttttttaaaaaacttacataatttcttaagattaaatcttaatagttcatgtttaattataaagtctaaatttaatcctcttattttgtatttctcacatataatatattctctctatatactaacgtgaatttatgaaaaagatctaggtcagtttgatctcccactcaccagaaaatggaagaaacatgggactgaatccaacctcaccttcttgcttaggttccgccaacaaagtttccacctcacaatttactggtccactatgtgaacaatttggggccaacattatctgccatatgttccaagttccaactccctttctcgcacgaaatttccctaaaccggcctctcaaatcctatacccacctcaagccctatagcaccaaattaattaattctcttctccttacaatcctaaaatctccctcaaaaacaataatagagagaatgaaggtaattttgtctttcacatatcacattcagcatcacttaatattgatgcatataagagttgtttgtgtaattgtcacagatgcaggaattatatcgatcatcagtttttttccgatccacaaagtcttttttttttttgtctgcaaataaagagtgtatttctatttgtatatgtcaaaagtcaggtacaagtagttacctaattgacccgactacaaaacgggaatgtaaaagatagaagtatatcctcaccaaaggttaatatctattaatgctaaaaaatgcaacataaataaagattagcagccatcagtgttatccctcaacataaacaaaatcctgcaaagcttttatatagcttttaccaccgaaagatatcttcccaccctgcacttgaaaccaaaagagattgaaaaaattgaaccctatatcagctacaatatggctttatcaacattaaatgactgagaatgactcaagcacccgaatgacccaataaacgaataagccaaatacataaatgctgctgccaaatttcttcataaggtccaatcttcaaaatcagcacgtgatagaaccataaagatagttattccagcaaaagacatgtaaaccacttggtggaatcagtttgatccaaaaatccaagcagcagggctagatttccattgactgaatgtatagtcgaaccccccattaaagagaatatcatgaattacattatcgatattatttatgtgaaaccaaagaacacatattgtagcacaccaaatatatatatttctaaatgttgtttgtgattgctgttaggagttgttgcttccttcaatgcttggtataagacttaagttcggtgaaagtttcaaggtgttgaaactttcacttggaatttgtgtttaatgtttcaacaccttttgagttgtttaatgtttttctataattgatgatctagaacttttcctcttctcttagatgatcttctctcctctcctatataaagatagtttgtgtgagagttgtgaagaaaaaggaagagagaaaatttgacaacacctctagagagaaatttgaaggtaaaacttttttatgaaagtttgagtgaatatataccatcattgtaggtgagatttaagtgtaacatcatttgttggtgaagtttgatattttgtacccattattttcatagtgaaagtttgattttgaattaatgttatgagtttttcctttttcgcattgaggaagatttttccacattaaaagattgtttgtgttctctatctctctcctttgtgcatttttattttcactttcatatttaatttttgaggaactacgttccaacaattgcataaccgaaaagcaattagggagtgttgaaggaatttattttaataaataataatggatattcagtttttgtattagagattaaaatcaatttgataattttgtaatattaaataattgatattaatttaccccgtgtctcatgataacaaatttgttacttaacaaccacacttttaagtacgaaaagacttttacaacatgtttagaatgagtcatacgtttgacgggctaggatatttatggaccacacacgattagtctaagtgaataattcatttcaaatgaaaattttacatgtcaattacattataatttgttaattaattgacccttcatgtgtacgagaaattttttagttttataatagtacatatctcatcatagttaatattttagtttagtaacttaatttcttattttatttaaattaatttttaaataaaaaaattatacaagcaatatgtcgtcattaatgtagtaaaggatctattatcatgggaggactaacatgaaaatttaatgtattttttgtttggaagacaatctcgtttcgagttagataggtcattaatgtagtagaaggtctattaccatgggaggactaatgtgaaaatttaatgtattttttgtatatacagcgtatttttcatgaaaaacaatctcgttttgaattagacagcaccattatgaacaattaaatttttctctaaatatttaacatatacacaattgcacatcaaagacttaaacttcatacttttaattaatttggaataatcccaaatcaatttatccacacgctacaagtcaaaagtcaaaaagatcgatatctcattactgaaattttattttaaggattcatattttccaacaaatactctttcatatacatatatttgaaggtcaaatctgtgattgtacatttgaaggttatttggtcaatcatacaacatcatattgattgttgattacatatccttttggatcgagcttatatgacacgttagacatttaaaacttttgctttagtaagagttggctgattcatgctagagaaggtagctactcatcagaaatatgaatatatatggtcgagatacattatcccacatctgccactacaactaaaaaacacttctctcttcttgttcaatgaagaggatagcagtgtaagggtgaaagtatcagggtttcatagtctgaaagcttttttttcttttttatcataattaataattgtattgttggaaaagaatatatacatagtaaccatgatacgtacgtgaggggaggaacttagtatagttacatacaactacactacttggtcaattcgtgttattcggtacttctgatatttgtttataatataatttttctnnnnnnnnnnnnnnnnnnnnnnnnnnnnnnnnnnnnnnnnnnnnnnnnnnnnnnnnnnnnnnnnnnnnnnnnnnnnnnnnnnnnnnnnnnnnnnnnnnnnnnnnnnnnnnnnnnnnnnnnnnnnnnnnnnnnnnnnnnnnnnnnnnnnnnnnnnnnnnnnnnnnnnnnnnnnnnnnnnnnnnnnnnnnnnnnnnnnnnnnnnnnnnnnnnnnnnnnnnnnnnnnnnnnnnnnnnnnnnnnnnnnnnnnnnnnnnnnnnnnnnnnnnnnnnnnnnnnnnnnnnnnnnnnnnnnnnnnnnnnnnnnnnnnnnnnnnnnnnnnnnnnnnnnnnnnnnnnnnnnnnnnnnnnnnnnnnnnnnnnnnnnnnnnnnnnnnnnnnnnnnnnnnnnnnnnnnnnnnnnnnnnnnnnnnnnnnnnnnnnnnnnnnnnnnnnnnnnnnnnnnnnnnnnnnnnnnnnnnnnnnnnnnnnnnnnnnnnnnnnnnnnnnnnnnnnnnnnnnnnnnnnnnnnnnnnnnnnnnnnnnnnnnnnnnnnnnnnnnnnnnnnnnnnnnnnnnnnnnnnnnnnnnnnnnnnnnnnnnnnnnnnnnnnnnnnnnnnnnnnnnnnnnnnnnnnnnnnnnnnnnnnnnnnnnnnnnnnnnnnnnnnnnnnnnnnnnnnnnnnnnnnnnnnnnnnnnnnnnnnnnnnnnnnnnnnnnnnnnnnnnnnnnnnnnnnnnnnnnnnnaaaaaaaaaagaaaataatataagcatgttaaaatgtttttgagcattttgttttaaaagcaggaaatcaaaaccatttgttttttaaaaaaatgtatggcaaaaaaacggtactcaaacaagttttttttttaaaataaaaattattttataaaacacatcaaaaattaaactgctcatatatcttggtgattagttttttcttagcatcgtcgagctatttatacagactaaaggataggattgaattttatgtgtagctgttacataagctggttttctgccactaatcacatatatacgggttttgggctcccactgtgctcacgtatatataatttatactaactttgctgattaaaaaaaagcttgggcttgctttctgaataaaaagatatgtttgtaaggattatctataatgataagataatgataattttagagaaggataaagacataaagttaacaataaagaggatatgatataaatgatgatgatatataataacagtacaagtaaaactcacgatttatgacaaactatttgtacactagatattcccgtttgctcttaaacatataacacaagcgcaacgaggtaattcatcatcacgattttcacttgtcaaatatctatccctcatgcctctcacaacatgagatttattcgtgaaatatattattataagtatgtagaactacactgtctcattattaatttgtgaatcttaattatcttgagattgagcagcaccttaagcatcttcccattgcatcctgaacacaacagctgaaacggcaaaacgcttggccttggaagccaccaccaatattagggaaaccaccaccaatattagggaaaccaccaccaccaccaatattagggaaaccaccaatgtaacccccgccaatgattgggatggaaccaccaatgtaacccccaccaatattgcctgggacaacaccaccaatgaaattcccaccaatgcctgggatgctaagtttgctaacatcatgaataccaccaactaatttggcatcaccaactctatttgtctctcttactacctcacctgcaaacacattaacacattaaccattgtggatagaaaaatgaatcttgcacacccattaggcattaggtgtatataatttgctagggaagagaaagataagagggaaaaaaagaaaatgataaatgtgattgatgagaaagaaaaaagaattgaaattttacagtagataaataatattcagcttagggatttagaaaaaaaattaaggtgtcacatgctaatataaagccttaaaaaagacaataaggaccaaaattaatgatattgtatatttttttagagattaaaatcgaaaaaatagttttataaggacaaaaactcaatctttggattttataggaactaaaaagatattaaacatgaaaattaataaagaaaaattaatatttatagtctatgaaagtacgtgtttttttttcttttcatccatgcaatttattttagaaatggtcattgtatattattttttttgttttgctccttattatattttgttttagttcctcaaacatatnnnnnnnnnncataattatgtaacacatatttaaacaaatagattattaaaacatttataacaaaaatacattagtaatatcatttcataaatttattatgtttttttttttgtagtttaacattgttttaaaagcttttattaatattctcttaattcaaaatactcatgagcaaataaggcaaaatgatatatagctcaccctctttcaaattcctggctgccacctctgaggaaatgaaaaggagcatggccaacaggcctgtgataagtaatgctatcttcgacttcaaacccatcttccggtaataaactacaatagattaactcaaatgagatatgtttggtaatgaaggatgagaatttaggggagatgtatactctatatataggaatggaggagggaaaattgggacctttctcttaattcgcgccgtagcgtattaattcaatcttttctagagttaaaaaccgatttgttcttgatcatctccagctcaatttccttctccattttcaatggtaaaaatttgtaggctatgaaattgaagcacagcaattattgtaagtgactacgtgtatatgctatgtgtaatggaaggtagagaagtagatacctactagtttgatagtttgatatcacaatattgattttatttattgtaaagacaaagttaaatgtagtttcccaagtatgtttggtatcgtttttaaataaaataaaattttcattttagtaatatatatatatatatatatttaatacaagtcttttaagatggatattagtaaagtaatattttaattataattaaaaaatagcagaaaaatactttaaaagctataagttttgtgctatttatttaaactatacgtcaaataacttactagtttgatatcgtgatattatttttacttaccatgcataaagtataaaattatttagcaattgagttggtataaatgtcccttagattgtttctattatgtaagcggacccctgatgggtctgatatcgtaatattattttcttgtactgtattgccatgttttaactaagggtcacaattcgtgccttgttttaataatattagtctttgcctttaaaaaaaaagtattttcggttttgttttctaattgaaattagactctatttcattaatgtatatgttgaccttaaatacgagcctttataaggtggattatcaaagtgatgcaccggatgcatgtaaaataatttaatattactgtttaatcataaattatttttgataattaaaataattattataaaaattaataaataaatatatatatatatatatatgatgatttgtttgtgattgaatatcaatgtaaaaatattttaaactaccaaaacaaagtctttttcctctaaataaaacggttatatgtatactcttatgatggaatattatgatggaatatatatatatatatattgtttttatgagcattactagcaaatttagttgtcttcagtaccatgtgtagattttttgtgatgaatttcaaacacaaaaagttgtggatgcatcgatcttgacaactgattgtgatggtgtgtgccttgttaaaaacagcaaaatcatttctctcaatggaactgtcgaatttttgtatgcatggatcctcagttttcactttgaccccttgcttccatagttgaatgtggttcttaaatatatgaggatctatcatattttatattgttcatttaaacgagaggataaaggtagttttattttcaaaataaatttatattacacctaaggtaagatagactacacagaaatctttacggggaaatataatctatatattaatgtcatacagtataacacctaaatttttactgtttttattaaataacattaatttcatctttcgtgagtgaaaacattaattcaattataaaattcaattaattagaatttatgtgagttttttggtaagtttcagccattgttctaaaagttagatcgactaattgactagtgtgacctgaaactagtctattgaccggtccattaactccaaacaacctagacatctcagtacgtatcaaacaagtccaaaatagtggtagaaaatcaatttgaatcgatatatttttattttattttttaatttcatcaaaaatatttttaagataataaaaatgcatatttaaataatttacataaatataaattattctatcagttattattatctttttatcttataaaaatataatttcattgtttatattaatttacaatttttaatcttaatttctcattatttatattattttattacttaatctggtatagcaacagtttgaccaaaaaataccatttgttcaatcatggtttagcctcggttgaaccaatacaatctgtgaactctagactaaagaaacacttaattaatacttacaatccttcatttgacgtcttatggtataataggacaattatatacattaatcatgattagagagtgagattacacccttttgacgaaacatctttctcacatttggtctaaagtcttttagagaaaagattttggtgataaggatccaaaaatcacatgggaggcaacactttctttattcaattaaaagttcgctaattcaattaagaaaatggtttgttttggtttttgtgtggagggctgttaattatacaggtaatccgtgaacttaatttgattcaaaatgatttaagttgaattttttaagtatttagattcaattcaatacaactcattcaaatacgttcatatattaattgaattacgagttttaatatttaaatttaagaatccaactcattaattatttaatttgtttattacaaatattattattaaagtaaattacactaatcattttaaaggtttcatgaaataccataaaaattttataatttaaacatttatagcagccttccttatagaaaaacttttcaaattaacatttaattaatataagagttgtcaatataatatttttaaaataattaagagattattatagttgtcgtgctcgtggttgtcattattgttagtcataatcatcgtcattattattaaacatattaatactacaattaaaataataataaaacctgaaaagaaaataaattctagttacaatatatatatnnnnnnnnnnnnnnnnnnnnnnnnnnnnnnnnnnnnnnnnnnnnnnnnnnnnnnnnnnnnnnnnnnnnnnnnnnnnnnnnnnnnnnnnnnnnnnnnnnnnnnnnnnnnnnnnnnnnnnnnnnnnnnnnnnnnnnnnnnnnnnnnnnnnnnnnnnnnnnnnnnnnnnnnnnnnnnnnnnnnnnnnnnnnnnnnnnnnnnnnnnnnnnnnnnnnnnnnnnnnnnnnnnnnnnnnnnnnnnnnnnnnnnnnnnnnnnnnnnnnnnnnnnnnnnnnnnnnnnnnnnnnnnnnnnnnnnnnnnnnnnnnnnnnnnnnnnnnnnnnnnnnnnnnnnnnnnnnnnnnnnnnnnnnnnnnnnnnnnnnnnnnnnnnnnnnnnnnnnnnnnnnnnnnnnnnnnnnnnnnnnnnnnnnnnnnnnnnnnnnnnnnnnnnnnnnnnnnnnnnnnnnnnnnnnnnnnnnnnnnnnnnnnnnnnnnnnnnnnnnnnnnnnnnnnnnnnnnnnnnnnttattaatatttaaatttgggttaattaattgtatatgtttttttctctaaattttatcaaaatttaaatttttaattcctaaataaaaagttgatcagttttaatccttgatctttttgacccgtcaataattttattcattatcattaaatatagccttatgacatatcattatttttattattatttaattatattttacgacgattatcttcctaattgttaaaagtcttcaaaaaataattagctaaagcattcaaaatatattaaacaatttttgactgataaaaaaaaaagccgattgttgcttgcctttatttcttatcaaaatcccattcaaacacatcacatgggattatttcaatcaacttgaatttattttcggagaccaaaccaagtaaaactatagaattatttcaagcaacatgttaatttattttcaaaaccggtcaaggctaaatcctttacagcggcactcacaaaatctgcaatctgaacattttcatacaattatgttaaaaaatttaaaaataagaagcatacatgaattttcttttccgtccaagcaactatgacctcttcacttatctcgtgattattttcaagatcacattcacgcctttcaagcaagttccaaaattttggttgtgtaagaaaaatccctatttttcggttgctaaagatttatctcttcgtcaagttttttggcttagggtatttgtttttgagcgagtcaactccaaaatgattctggggttggaatcggtgctgatgaatcagtcgtggagaacgttccggtagttaaggaggttctgtatcttttggttgagaccctcctcgccgattttcacggtggcgtggtggaggagtgtgtcgttgagccgccacggctgatggtggatacaaacacgatcgagattcggtcgagcttgatggagggggtgatgtcgtggcgcacaatggcgtgtaaggtgagtgcaaagagagggagcgaagggtgcatttcatttgggagggttcttgagggataataaatgaacaaaaatataacaccaagttttgatctttccttccaagtcctaacctttccacaatctaatgctaatccatcaccatattcagaaatcacaacgaataagaaacacgaaccaacgataaacttcaccgcatgccaaatcgacccacttgcagaggcggagggaggggggctagagtgggtcaccgtttctctaaaattttattaaataaattttattatatatatatatatatatattaaaaattaaaaattaaaaaataatttaacaataaaaaatgttacattacataatataatatgatataatatttttaatattatattaaaaaataagataaaatattttttaagattgtattaaaaataagatataatattttttaatattgtattaaaaatatgatagaatatttttaatattgtattgcataatataaaatatttttaagattatattgcataatataaaatttctttaagattgcattgcataatatgataaaatatttttaggattgcattcaaaaattggttaaaatcatatgcttaaattaatataaatagaaacatatttttatgttgatagtatgcattccattccaaataatattagagctttagagagtttatgtttgcatcatcgagagaattgttatgagatcatatagaagcgtttgataagtctgattcttcactctccatcagaatttgaaggtacttatttattatcatagtggagttgtccattgaattgattatccaatttggacattgtgattttttatccaattaggtttttcacgctaaaactgattctgtcttctttatctcttatcttcatattattactttgagtttgattttaaattatgaattattttattaaggctcactagactttgtcagcttgttcatcaacccaccttgtttacaatttgtctgtctgtgatttgcggtttgcatctttttatatattagatttgtattgtcttcaaagtacttttatttatgatataattttttttatattcacctcctctcaataaaatttctggctccgccactgcccacttggagagaaaactgaaaccgagctcagaaacattgacactggaaagaggaacaactaaaagcaaaacccattgaaggaaaaggccttcattgttttcattcacactgttttaatttttttatttatttgtgtttcaaatggattttgatttgtgttttgaggatgtgatttgctgtttaaagtaatttctgatagtttcagcagtgagaagttaaacattaattaagtatttttttagtaattttttaccatcaaaaaaggaatcaccttaaaatataattaaataataataaaataataacatatcatttgttaaagattaatcaattttttattcacggattaaaagtgaataattagaaaaaattagagaacaaaaacataataactccttaaattttaataaggtaactccttttctaataacaaaagcattgaacttttttactttgtatctatgatagtgaatgtaattagtaaatctcattatatattgcctcttccacaattgagttatctttataaatattggttgtagtatacattcttcgtcgaccacgatactataatcgtttatttttctcagaacgaaaaaaaaaaaaaaagattaggctatttgtatcacatccataattttggcccatattaagccgttgttaatctatagttttttttccttccattttttcagtcttgatcgatgctgctatagactatagagtatagtccattaacacacgtttttttcggggttttttttgtgaatacactttttattttcgttgattccacttttaagacgtaacctatttattttaaatgggaacaccttaatgaagtatgtagttaattatctccctaaatccatttaatgttgttttactaataatataatgactattataattataatataataactattattataatttgtatgggaagaggagttgttccaggcattgcagcatttgctagattcagaaaaattaaatttagacatgaatgacagatgtgtgtagctgttggaagcagatggggtgtattaattgagtggcttcagcatacaaaagcttgcataatagaaccaatgtgacacttctgaatgtggatgcgacgctgccgtggaattcaccggttcctttaaaggtaattatgtgtttaaagggaattatgtgtttgttcttagttacatataagtgtttttaacacttgtagtgaaaaaaataagatttattttgcatttaaaatatataataataaaaataaagaaaaatatatttgtgtatctaaatacacttcttttgaagaagcaacaaaatttttctttaatagtgtgaagactttacgtatattcacacagagatcaatatatgtcattaactctttgatgagtgaaactctaaaaagcaaactatctttttacttttcaagtctaaaactaggctttgaacttttctattttgtgtctagtatactttgttcttaggtagatacttttatttataatgttacatatatatgaattttggcattttccaaaaaggagagatttcacttaaaataaattcatatatctttatatttatatttgaaaataaaactatttcatatcttttttatcttaagaaacttcttgatataagacaaagataattctcaaataatcacannnnnnnnnntacttcttaacccgtccgtataatatgacgtaacatattttaccttcaagaatcaatagaagaataatgtaatattttttcatcatttacaactcaagattaactctaaagtatagtgttactgccaaactctaataaattaatatattttatttaattaatgaatgacttaaggtcttaattctatcatagttcaaaactcattacctagagtttatgaattttttttttattaataattaattctacaagtatttaatcatattaaatattcattcaactagtactctaaagcattaggtggccgaaattaaaatataacaaataaattattaatcactaatataatttcaggtcaaagaaaactatatatgtcttcttgagaactttctattaacatattaaggcaatattaatcataagaaattttcaattaaatcagttcaacgatgacatccacatatacattatctatatataatttaataaataagatttattaatttttatccaataaaaactatttcatatatattaatctattcgaattattgttgtcctattcagaataatcatacaatcaaaaataatctagattaaaattataaagaacttatttttcagtaacataatctttatcatgataacaaattttttattttaatcaagatcttgtcaaattaaaaatttaataaaataataaatatattaataaaataaataacaattttttactaaaattaataattagatattgggtatatacatttattccaagcacttttctgaaaaataccaactaaaataaacttacggaggagggggtgctatgaaatgaagcccatgttgctgagttgtgggtaggggtatgatatattggtatggggaggttttgggttgtgctgtaatgtttctatttcaattcttggattatgctgttctacttttaggcactctgatacatcttctatcagtatgtttggcttattaatatatttttgccttttaaaaaaaaactaatatcataaaattatagtaatgttgtaatatattaatttatattacaataacattgtaatattatttacggtcaataaaaataaaaaaattggttttaaaaccagttttgttttgagaattttgttttaaaaacaggaaatcaaaagccaaattttaattagaacaacatgattaattaaaaaaggtaaccaaacaagttatatatatatatatatatatataatttaaaaaaacaaaatttattttataaaaaacatatcaaatagccctcatatcttggtgattattagttttttcttagcatcatcgagagataagaatgctcctaattataaaccaaagattagaattgagttgtatgtctgagatatcattcaaattttatcaggcctttttagtcgagggaatttaaatgcagcattgaccttgttcaatttagcatcggcttgctaagttttctgctttctgaattcgattgtaaaatgacaatataattatagaaagacaaacttaacaacagggaggatgataatacatagtaacatgacagaagtaaaactcactatttattacaaactatttgtacagtagatatttgagtttgctcttaaacctatcacatagtacggcgtattattgatcattaattctactagtgaaatatctctactgttaagaaaggtcgacagaaatgacatgcaggcctccatgttgtctatccatgcctctcataagacgagatttattcatgaaatatattattaagtacatatagaatcacactgtatctcatttatatgtaggtcttatggtcagcagcaagctaagcaacctcttgcatccccataacaacagccataacggcaaactgattggcctgggaagccctgacgagggaagccctgaccgggaaagccctgaccgggaaagccttgaccgggaaagcgttgaccgggaaagccctgaccgggaaagccttgaccaggaaagccttgaccgggaaagccacgaccaggaaagccctgaccgggaaagccacgacctggaaggccctgaccgggaaagccacgaccagggaagacaggactaggtatgccacgaccagagccttgcaaccctccaccaactaatttggcatcaccaactttacttgtctctttaagaacctcatctgcaaacatattaactcttaacacatgaaccatgggaaaacgaaggggaaagatatctaggtttgaatctctcactatcaaaaattaaacaattaataattaatatttattgataaaaaaatacataaagatagggacaggtgcaaacgagaaagaaaatgattaatgtgtttgacagtgagacaaagagatacaaaaggaaataaagtggaaataaaaattgaagttttagaaaatgttggatgatagaatggaactattccgtcagtttttagaaaattttcatttatgtgtttttaaatctcaaaacaacattaattattttttgttaattaatttaaacaacaagatttttttctatcatattaatctacatattcattatgaaagtagaagtgaaaataccactgatatatatttattgtgaagaagaataaaaaaacatatgaacaaaaaaagatgtaatagaaaacttaataactattttataaggaaaaaaattattgcatgtataaaaaccttaaagacaataataagttggaaaagatatataatgccagaagggggggtgcattttttaccaaatgaatagaattatgcatgcatttaaggacaaatatatatatatatatatatatatatatatatataatccaaaaaattataaaatgtttataacaaaaatataaaggtagctagtatcgttcttttcataaattcatcatattcttaatttttttaactagtgttttaaaaacattcattaatattctcttactttaaaatactcatgacatgcaagagaatagaaggcaaaatgatatataactcaccctctttcaagtccctggctgccacctctgaggagatgaaaaggagtatggccaacatgccaggaagaagtattgctaccttcgtcttcgaatccatctttcagtagtatactacaagtctacaacagatctactcaaatgcaatatatatgtttggaaatgaaggatgagaaaattagtgcaaatgtatactctatttataggaggggaggagggagaagttgggacctttctcttaattggcgccgtagcgtactaattcagtcttttctagagttaattaagaactgatttgttctggatctccagctcaatttccttcattttcaatggtaaaaagtggtaggctatgaattgaagcatgtaccgcaattaattattattcgtcaatacgtgtatcaatttgctatgtaatgaaaagtggagaaatagacacctactgtagttttttttatttatgaaatatattgtagtttgtttttacataccataatatcatttttatatatcataggtagaaaataattcaaaggacaacgttagatacgttttcttaagtatttccgaatttgttttctaatgaagattcaaattttattttaattagtatgtaatagaaatagaagaatgtgataaaaaaatatttattttagtaatctgtataccgactttacttttaataagagcctttaaaaggtagaccaccgaagttaaattttaattctaaaccaaaaataacgtaaaacaacttaaaaaaatgtatttggacaaggaattctaaagaggtcattcatttttatagagaatctaaaatgtgtgtgtgtacatggaatttagaagaaatcaagaaatttatgaaattattttcactacttcacactaatattttagtatatatgtacattgcacagaataaatgatttttttaaactaaaatttataataaataaatattttaaatatataaattataatataacttttttacaagatagattatatttaattaaaatttataataaaaaatattatatcaaattataactaaagatatagatattgaaagagataagaaattaagttcggtaattcagctcatattaaaaacataaaaaatatatcatatgtatattaggaaaatatttaaattatttagataatatatataggatagaaattcagttcatatatgtnnnnnnnnnnnnnnnnnnnnnnnnnnnnnnnnnnnnnnnnnnnnnnnnnnnnnnnnnnnnnnnnnnnnnnnnnnnnnnnnnnnnnnnnnnnnnnnnnnnnnnnnnnnnnnnnnnnnnnnnnnnnnnnnnnnnnnnnnnnnnnnnnnnnnnnnnnnnnnnnnnnnnnnnnnnnnnnnnnnnnnnnnnnnnnnnnnnnnnnnnnnnnnnnnnnnnnnnnnnnnnnnnnnnnnnnnnnnnnnnnnnnnnnnnnnnnnnnnnnnnnnnnnnnnnnnnnnnnnnnnnnnnnnnnnnnnnnnnnnnnnnnnnnnnnnnnnnnnnntatgccaaaaaaaatgttatatcgttaaaaaaaaattgaaaccattctttctaattaccatgtgtgacccgttaactacatatataatatttaacggaatattagatgaccatctactgaaggatgctcaactctgagttattgagcgaaatttatttatttatattaaaaaaatcaattaaatggatacaaataattaatgtgtcaaaatgaaggttgaatcatttgataaaaataattttttgataaattttacttatcttcaaagattatattttttttcacttcatttaaataagagttgtaaccatatggaatttttctgtttcttagtatgatttttatcatcatctctcgttgaatttcggattagtagcataaggattaatatatatatatatatatatatatatatatatatttaataacatttgttatcacacatatgaagataaaaacataaatgttaaaatcataaaaatttaacctatctaatcaaataaattacataactcataattgtcttttatgtgatcttatattttaaaattgtctaatgataatctcattgtcaatgctattgaattttcactagaccagttgtcaaatttccaaattcattgccaaatttccattaaactcatcgtcaacttatgctccaactagttgccaaaatcattaaatcaatagggacaaaatgttcctctttgtaaatgtgttctttgagtcttatttcgataattaattagaatgatatgttaatttttattcgctggagagtttgaaaaataaaaagaattgaaactcagaaattgaggataataatggattcaaatatatataaacatgagagaaaaatacaaaagctctaaatatatnnnnnnnnnntatatttataattttttcaaagtctagggtatatttacacacttccaatcaaggacggatccaaggggataagcatgggttttctcccaagactctttatgtataatgagaaaaaaaaaggaaattaaaataaaaatgctaatagaggaaaataaacaagaaaaataggatttttcatttaatattttctaaaattctttctaatgggtccttttttagttttacacataaaattaataataaatactttttataaactaaattatcatttattaaaatagctatttattagaaattaaatattaaaataattgtataaaacaaaattcgtccccatttataatacattcctaaatccatctctactcttaattcaacataggcgtgaccattttgggcgggatatgttagtgtctatgctaccacattcaacatattacacttaatttgaaaagaaatctaaaataaatgttatttatatatctgaaaatgaatgttaaggaccaagattagcgatttttatattttgcatacataaaactaaggaaatatttttttacaaaaagtaaaaataataatttcaaattctagaagaaagaaaataaaatataaaataaaaacctaaataaaaatttattcattttatagaaacaaaaatcatatttatctttttaacttaatcataaaatgccaaaattaattaccaccgatgggtagatgatgtggtgtgagcagacaaaatagagaaaacacagatcaattaattttacgtacacgttacaatatattttcttccaagtttgttttttcaaactctccattgagaatcctcttgaaattaacttctgcacagtataatttcaaaatttatttttagaatagtaacttaaaaatgtcttgaaattttcaataaagtcgtggcttatgtattatttatattcttttataaaagtcgagtaattaaattttttattataggtaaaaaaaatttacattaaacttttcacaattgacaatcctaaacaagaatgattagtaaataatttttattgttttataaaaaaatcaagnnnnnnnnnnnnnnnnnnnnnnnnnnnnnnnnnnnnnnnnnnnnnnnnnnnnnnnnnnnnnnnnnnnnnnnnnnnnnnnnnnnnnnnnnnnnnnnnnnnnnnnnnnnnnnnnnnnnnnnnnnnnnnnnnnnnnnnnnnnnnnnnnnnnnnnnnnnnnnnnnnnnnnnnnnnnnnnnnnnnnnnnnnnnnnnnnnnnnnnnnnnnnnnnnnnnnnnnnnnnnnnnnnnnnnnnnnnnnnntattattattattattattaaatgggtttttatgaactagcttttttaaacaataaaaaagtagaattataaacatacccctctctctatatatagaaagagagaggaatgctaacagtttactccttttaaactcaattataagtcacacaaaaagcttcggtgaactcaaataaaagtaattgttaattacttaccctatttaattatataacttcaaacatgccctttaaattaattaattgagagtatatttcctaagtcttgaagaggtagtccttaacataattttttaatacacttttattactgatttaattattgaaaattataattttttgtatgtctcacccttttatttagtttttaataaattttattaatagtagtagattgtgtattggaaggagtgttgtcgattcacacaaaaaagaaaggaatgattgttgttgttagcatccctctctctctctctctttatatatatacactacaaaaaaaatgtttagcgaccgctttgtcggtcgctaaatcattaaattcggttgctaaaatagttagcaactgaaatgacaaccgaattcattttgtcgctaaaatcgagtccctaagtccttagtcaccaaattcatatttgatcgctacttagcgaccaaataactcggtggcaataaaataaaactcgattgcagtgtatttggttgttattttgcttggcaccaattctgcaatcgaaacatgcaaaagtaaatttggtcgctaacaattaataaaattttaagcataaaataaattaaactaatattcgatttctattttcgtcgttattgaattaatttaaaacaaattttaaaaaatttcattcggttgctaattttggtggctaagttataataaaatgtattgatataattcggtagctaacttggtcgctatttaataattaatttcagaattaaaatgcagtttggtagctatttgatttttaatttttaaatataaaattaattgaaaatacaaccttggtcactaaaggaaaatatgcttatttttttccttttcatacgttacattttgacttgctcaataaatattgactgttaatataattattaattaaattgtataatcaaatttataagtaaaagtggacattcataatgtgtaaataaatctattaacaaagttctaatttaaatattgataaagttcaaattcaaagtttattaaaatgcaatgtcagagaataataaagttcaaattcataactaatatgacataatcaaactaaaataaactataatcaggaatcaatggtcctttgacatgtcatgatgacgatcaacctgagtatcgtcaacatggtgcacaattccatccgttgtggtagtcgatggattaagtaggggtgtttgcgggtcgatttggatcggttttgatcaaatttaggatccaacccaatcaaatttgatcggttcggttttcagaagaaaaaaattaaaactcaacccgttcatgaacggttcggttcggttcggatcatcgggttatccatttaatatttttaggactactattttatatcacgattctttcaaatattctatacaattaacacaatattgattcatttaataccatcaacataatattctaaaaaagacttataaaataaattaaaacaaaagattttgaacaagatttactataatagtctgaatcacaattgtttcttacaaaccaagctttgttataaccaatttattcaagtgttataatcaatttactataatcgatggatagattaagagctgacataatagactgaatattcaagtgttgtaatatacgttgtatttgctaattttgttgaataatttgctcaacatcaattgcaacatcttttcctcaagtgtcttctccatatctgcctttgccaaaagctcagcatttaatttagtaattgtctcatgcatttcctctatttggtgttctacaagagcaatataaatagatgaagctgattttgagcaactaaaccttttgctcaaagtacctagtccatacacattgcccttgtaatttggacctcaaacaacatcaaatatatttcattatcattaacagaagtacgagtgttaggagaatcttgtgtagatgtacgtttctctatcgaatattataagattttgtctcgatgatgttgatatttctcctgcaatataaagtgagatatgaagataaattattaagtataaacatataaggattactattcaagaaaatcaccactaatacctgaaaaaaaaattgactttaatctactatagtaggcttcaaagtttatactagtcaattacaaatatttttaaataattataagaaacaaacaattattttgtacaaaaactaattaaaagattataaataagtatgattttttatttatcttaataaaaaatgtaaatattggtttgttaatttaaaaatattactaatatattatttcaatacttttcaaagtaaaaaatgtatttaggtatatgatattttttatgatttaaaataaattaaaatttagtttgtaactatttagaaaaaaacacatttttcgctaattcatcgctaatcttagattgtaattaaatagcgaccgagataatttcaatcgctaccagcataccatagcggctgaatactttcagtcgcaactttaagtcaatcttcggtctctataatactattttttgggatcaagacaaaaaatttgcttctatcgaaaatgcgcatgcttcttttgttgaaataagtataaatggtttggttagatatttcttaagaattgacttagtgaaccgccctttccccttctcacaatattaccgaacttgctcaagaatgaatggcacttcgaagtgcctcacgttgggggatcggcaggaaagaatttggatacaaacattaattggtcgtgtattagcagacgatatatacagaggttcacgatgcattgccattagaaatctctataatactattttggatagacagcgatcaaattgatcagtgacacttcgtttcgatcgttgacacaattaggtcaccacaataaattttggtcgcaaattcgctctcagttggcgatcgaaactttcaatagctattgcatcacgaatagcgacctatagttttcgatctctaatttcggtcgctaaaatgcatttttctagagttgttactagtattgtatatttgcattttttaaaagaggagaatcgtgtatttatcacaaaaaggaagacaatataatacttgtaactttttgaataaattctattccacaccctctaagattttatcttattattctcatatccttcctttattagtccttacaataaactctttaacagtttacatgttattacattctttcccacatgctctaagttctaagcttcaagagggctttaatggtgggtgaagaaaaatctagttccaaacccttgaatcttgggttgaagatgagagaaattgaaagaaattcactgagtgtgtattgtgtgtctacggtgaagagaaagaaaagaaagagtggaattggcttgcttgataagttttaataagaattgccaacttcatgacaagtggccaagtaatttgtggtctagaaaaattatagttagatttaatttagttgtaattgttgatgattatccttaacaaactcaagatcattcctatgtaatgagaagtcaactaagttaccattttagttggagtaactaaatattataaaagaaaaagcatagaaaaattactttttgttacttattataattactaaaactaattatgtaatttaatttaattttttactttgtaaattattagaacagcagagaggatgatacatataaacggtgatgatatatagtaacagtagaagtaaaagtcaacatttattatatgacaaattatttgtacagtagataattgattttactcataaacttaatgacacaggcacaaacgagcgacgacgtaatatatattcaacatttattatatgccgctatccatatgtcatatgtgcctctcataacacgtaagagattttattcataaaatatgttattataagtacgtagaattacactgtcgtctcaactatgtatcctccaatagctagggcatcaacaccttaatcaagcaacctctttcactacatcatccccatctcaacaacctttacggaaatcctcctgggatgccaccaccaccaccaaagccagtgcttgggaagccgccaccaccaccaccaccaccaaagccagtgcttgggaagccgccaacaccaccaccaccaccaaagccagtgtttgggaagccaccaccaaaactaggagtgaaagggaaaaatggattagaggtgggaaagccgccgccgctgccaccaccagggtagaatcggtagccggggaagccagggaagaagccggggaaacgggggaagccattgaagccgaagcggaagccagggccaccaccaaagccaccaaagttgacgccacgaccaccagacaatccagcaccagtgactggggaagccaccaccaaggtaacaattattatgatcaaaagaatataaccccttatattgcaaacatctttttaaattcaaaggttcggtatgaaggttttaaggatatcaaataaaaattaatcaatacaaaaggattaaataatattttgttaattagtatatgtaactacacttctttttgtttttcattcctgtcatttttttaaatggtcatcctaattattatttttttcattttggttctttttatttggttttagtcctcaatatatattattttagtttttataatatttagtacgtgtatttttttaattggttggtaatatttactgtattttgaattagtctctttgtagaaaaaataaaaagaaaattatccacaattataaagtcaaaaacaaaaaaaaatcaaaaattcaaaacaaaataataaagaccaaaataaaataaaaatcgcaaaaggataatttagaaggaaaaaatttaagaacagaattaaagcaaaaatataaaaagaacatatagttacaggacccaaaacatataattcaagtgaataaagaaatcattaaacattcataacaaaaatatattagtaatatctttagataaatttattatagtttaattattaacattcttatagtttaaactactgaagagaatataaggcaaaataatattatatagctcaccctctttcaattctctggctgccacctctgaggagatgaaaaggagcatggccagcaggcctgagataagtaatgctatcctcctcttcgaacccatctttcagtagtaaataaactgtaacagatctactgatcaaatgaaatatatttggtagtgaaggatgagaagattagtgggaatgtatactttatatataggagaggggagggagaagttgggacctttctcttaatttgcgccgcaatgtattaattaattcagtcttttcgagagttaagagccgacttgttcttgatcgtctccagctcaatatccttctccattttcaatggtaaaaagctttaggctatgaaattgaagcacagcaattattgtacgtgactatacgtttatcaacttgctatgtaagtagacacctactgtagtatgctatcatatataaaatcatttttatatagcataagtataaaataatttaaaggactaaatcaaatatattttcttaagtattttcggagggtttgctttctgattaaaattaattaaaattttattttaataatctatatatacggacctttaatacaaagtctttaaaaggtgggttacaaaagttaaattttacttttaacaaatttttttttttaaaactatacaattattaaggggattacaacaatgtacaatgtacatgagttgttacaaaaaagttatcatgtgtatagtgtaaaataattttaattttacagtgtcatatcataaatcaccattatgataaatttgttgacatctaccataactgtttatatattttttgtcttaatcattcaattaattaggaaaaaaactttgactaatctaaaatttaattgaaaggtaagtaaaatttgactnnnnnnnnnnnnnnnnnnnnnnnnnnnnnnnnnnnnnnnnnnnnnnnnnnnnnnnnnnnnnnnnnnnnnnnnnnnnnnnnnnnnnnnnnnnnnnnnnnnnnnnnnnnnnnnnnnnnnnnnnnnnnnnnnnnnnnnnnnnnnnnnnnnnnnnnnnnnnnnnnnnnnnnnnnnnnnnnnnnnnnnnnnnnnnnnnnnnnnnnnnnnnnnnnnnnnnnnnnnnnnnnnnnnnnnnnnnnnnnnnnnnnnnnnnnnnnnnnnnnnnnnnnnnnnnnnnnnnnnnnnnnnnnnnnnnnnnnnnnnnnnnnnnnnnnnnnnnnnnnnnnnnnnnnnnnnnnnnnnnnnnnnnnnnnnnnnnnnnnnnnnnnnnnnnnnnnnnnnnnnnnnnnnnnnnnnnnnnnnnnnnnnnnnnnnnnnnnnnnnnnnnnnnnnnnnnnnnnnnnnnnnnnnnnnnnnnnnnnnnnnnnnnnnnnnnnnnnnnnnnnnnnnnnnnnnnnnnnnnnnnnnnnnnnnnnnnnnnnnnnnnnnnnnnnnnnnnnnnnnnnnnnnnnnnnnnnnnnnnnnnnnnnnnnnnnnnnnnnnnnnnnnnnnnnnnnnnnnnnnnnnnnnnnnnnnnnnnnnnnnnnnnnnnnnnnnnnnnnnnnnnnnnnnnnnnnnnnnnnnnnnnnnnnnnnnnnnnnnnnnnnnnnnnnnnnnnnnnnnnnnnnnnnnnnnnnnnnnnnnnnnnnnnnnnnnnnnnnnnnnnnnnnnnnnnnnnnnnnnnnnnnnnnnnnnnnnnnnnnnnnnnnnnnnnnnnnnnnnnnnnnnnnnnnnnnnnnnnnnnnnnnnnnnnnnnnnnnnnnnnnnnnnnnnnnnnnnnnnnnnnnnnnnnnnnnnnnnnnnnnnnnnnnnnnnnnnnnnnnnnnnnnnnnnnnnnnnnnnnnnnnnnnnnnnnnnnnnnnnnnnnnnnnnnnnnnnnnnnnnnnnnnnnnnnnnnnnnnnnnnnnnnnnnnnnnnnnnnnnnnnnnnnnnnnnnnnnnnnnnnnnnnnnnnnnnnnnnnnnnnnnnnnnnnnnnnnnnnnnnnnnnnnnnnnnnnnnnnnnnnnnnnnnnnnnnnnnnnnnnnnnnnnnnnnnnnnnnnnnnnnnnnnnnnnnnnnnnnnnnnnnnnnnnnnnnnnnnnnnnnnnnnnnnnnnnnnnnnnnnnnnnnnnnnnnnnnnnnnnnnnnnnnnnnnnnnnnnnnnnnnnnnnnnnnnnnnnnnnnnnnnnnnnnnnnnnnnnnnnnnnnnnnnnnnnnnnnnnnnnnnnnnnnnnnnnnnnnnnnnnnnnnnnnnnnnnnnnnnnnnnnnnnnnnnnnnnnnnnnnnnnnnnnnnnnnnatatatatatgtatatatgtgtatatatatatatatatatatatatattaccataaaatgaatgttgggatcaaaattagtgaatttagattttgaatatataaaaattaaggaatttttatttaccataatcaaaattcactaatttacgtagactaaaaatagttatttcaaatttttagggaaaatgaaaatcatatataattctttcaattacatgtaaaaggctctaattaattaccaccgaatggatagatgatgtgatgtggtcaatcgaaacaaagaaaaaacaattggacgaatactcaaattgattctcaaaagtagtatgagacactataattttagtccatgaaaataataacattaannnnnnnnnnnnnnnnnnnnnnnnnnnnnnnnnnnnnnnnnnnnnnnnnnnnnnnnnnnnnnnnnnnnnnnnnnnnnnnnnnnnnnnnnnnnnnnnnnnnnnnnnnnnnnnnnnnnnnnnnnnnnnnnnnnnnnnnnnnnnnnnnnnnnnnnnnnnnnnnnnnnnnnnnnnnnnnnnnnnnnnnnnnnnnnnnnnnnnnnnnnnnnnnnnnnnnnnnnnnnnnnnnnnnnnnnnnnnnnnnnnnnnnnnnnnnnnnnnnnnnnnnnnnnnnnnnnnnnnnnnnnnnnnnnnnnnnnnnnnnnnnnnnnnnnnnnnnnnnnnnnnnnnnnnnnnnnnnnnnnnnnnnnnnnnnnnnnnnnnnnnnnnnnnnnnnnnnnnnnnnnnnnnnnnnnnnnnnnnnnnnnnnnnnnnnnnnnnnnnnnnnnnnnnnnnnnnnnnnnnnnnnnnnnnnnnnnnnnnnnnnnnnnnnnnnnnnnnnnnnnnnnnnnnnnnnnnnnnnnnnnnnnnnnnnnnnnnnnnnnnnnnnnnnnnnnnnnnnnnnnnnnnnnnnnnnnnnnnnnnnnnnnnnnnnnnnnnnnnnnnnnnnnnnnnnnnnnnnnnnnnnnnnnnnnnnnnnnnnnnnnnnnnnnnnnnnnnnnnnnnnnnnnnnnnnnnnnnnnnnnnnnnnnnnnnnnnnnnnnnnnnnnnnnnnnnnnnnnnnnnnnnnnnnnnnnnnnnnnnnnnnnnnnnnnnnnnnnnnnnnnnnnnnnnnnnnnnnnnnnnnnnnnnnnnnnnnnnnnnnnnnnnnnnnnnnnnnnnnnnnnnnnnnnnnnnnnnnnnnnnnnnnnnnnnnnnnnnnnnnnnnnnnnnnnnnnnnnnnnnnnnnnnnnnnnnnnnnnnnnnnnnnnnnnnnnnnnnnnnnnnnnnnnnnnnnnnnnnnnnnnnnnnnnnnnnnnnnnnnnnnnnnnnnnnnnnnnnnnnnnnnnnnnnnnnnnnnnnnnnnnnnnnnntcatttttcatatatttttcatattgtttatacatctttttgacccaaacactagttgatttttatggtttttatatagatgtatctaatgagataaatctcgtatcttgaatcaataaaaaaatattcaaaattgtattaaaaaattgaaaaaatcaattctttaaaggattaacttatcatgaattaaataaagagattgttttagaacttttaaacattaagagaccaatttaaaaccaaaaaataagttaaggaaccatttgatatgtcatgaaaaaaataaaatcaattaactttaggtacgttgcaatatattttcttcaaaggtttttttacattctccattgtgattccccttgaagttttcttatacagtataacttcaaaattcatttttagagcaacaactttaataaagttgtcatttacgtatatgaattaaactatttttttaacataataccatatatgaatcgtgaatattataggtaaattattttttaataaaaaatttctcaatcctaatcaacatgaattagtaaattattttattttattttattttttatgaagtccagtacggaaaatacttgcctcggtatttcatccaccatttagttttaacttttatagccccagtggaattatggaagtcctaactctgacatttgattttttatataaaaagaaaactcgagtttcttctttatcttcataaaactaaaagaaccaagttaatttttcattttttaagacaaaattgtggctcagttgtttgataggttatgatataaattcagtcacatcctctttttttttggcaattacctcttcctcctacagactcctctcacatgccacattgtcaactagattgatttcatcaaccaacttgttaatttgtgtgtccaggttcccgaacacttccactccacattccacctcctttcatgtaacttaattgaagccccccaacggctaaagtttttaaagatggaaacatggcctattgtctatcttcaccctaaattgaaacctatagtaaaaaaaatgtggaatgtggttaaaattcatagtagaatacatgtacctaagtcctaatataagaaacttctttgatttagttaattactctttacaaaaggacaagagttttaaaaggaaaatgacatttgcatgcagcgctatctatcttcaccctaaattgaaacctatagtagaaaaatgtggtgaaatttctatatatgataatataattaatgtatggtctctaatagagagaaattagtcgtgatgacaaatggagtgaagtcaaagtgctttcgcaacatgttaaatcaatgtaaatcatctggtgagaaacttaaatatctctttacctttgaaatatatatttagaaaggttaactataaaatggtattaataactagttgtagtttgaaaagttgaagaacgagacaaggaattacaattggctctcttgcttgcaacaaggttaagcatagtggtcctagaggatgttacttctaacgactataatggaaactgcagactaaatggtcatggaagcgcaaataagagtgatagaaagagaattaattaatttaaaaagtttatttaaaaaaaaaatctaaagtttatttgaaacttgatatcaagaataaataaaatcatcaaaaatagaatctcaattaattgaagaaagtttttaaaatgatatcattaaatatagtgaaagtaattaaaatttatttataattaagttcgctaaaccttttatttttttcttataattgaatctaagagagagtatgttttgaataatgaagaatttttgtaaattcttgctcaaaggttgctgcaagagaatgctaactcttaataaccataaatataagtctccattccacgtacggtaatattatatagatagcattcaagtgtttggtataagccatgggacaacaccacggagttaattattttttttcctcttgtattcaaataaagagcacgaatcaaagccataaacaaaatagacagtaaaatatacctttttgtcattgaataatgaggcaaagtagccacatctttagaggtatacacagataaatataataatattaaatgtctttatatataacacgatacaaatttgtcttccacttgcactagagccgctcaaacctgtttctaatgtctaatgatgatcgatctagtatgcccttcatacttaaaatgcacaagaggtttagtcaatgggtttgcaacattatcattgcgcgtttgttttcactttgcatattttcttatctcccatgttctctcgatcgaatgagatgtggaagtactcaagtatatgcttacatctttgatgcaatctagaatccatagttattgctattgctccactataatagagacttataggtgattaattaattagttttttccttaacccacatatcctggtgattagttttaaatttcttagcatcgcttagctaaataaaaaggctcctatatatagactaatggttaggattgacttgtacgtgtagctgttatgttattcatagtttaataattaggcattggtaattaggggaaattaaatatagtgcagcattgaccttgttcaattaagcttaggctttctaatttgtccgctttctgaataaatagatacggttgcaaggataatttataatgacatgataattatagagaagcaaaaacttaacaacagagaggatgatataaatgatgatgatatatagtaacaatacaagtaaaacccacgatatttgacaaactatttgtacattacataattgatatttcagtttgctataaaaatcatcacagtgatcacactgtattttcaatatgacgtattattcacttattctatacttatgaaatatctctggtggtaagaaaggtcggaaaaaagatagacttccttgctatgtatccatgcctttcataactcgagattttattgatgaaatatattagtaagtcgtagaaattctacagtgtctcattttgtgggtcgtatcttcagaatatagggcaacacctaaagcaacctctgaatggatccccaaaacaacagccgaaacggcaaaaccttgggttgaagccacgatcagggaagaagccaccaccaccaaagccaccaccaaaaccacgaccagggaagaagctgccaccaccaagtaatttggcatcaccctcattggcctcttgaacaacctttcctgcaaacacatttaactcttaacacatgaatcacttatgatagaataatgattttttgcttacccatttggtgtatgtactttgtgagggaagagagagataagagggaaagagaaagaaaatgatatattagattgacgatgagctgacaaagaaagaaaaggatataaagtgatcataaaaattgaagtaagaaaaggttaaatgataataaattgggaaaagacacagtggggaaaggggagtccattatgatagaatgaataagctaaaaaaagctcatgtattctaaacatcttttaagttgaaaggtttttgttaacgagtgcttaggacgttaatttaacttgataaataaaaaaaatcttaaatattttgttagttctgaaattaggcattttttactactttttgttattgcaactttttaaaatgatattggtaactattttctacattttgatcctttgttttttatcctataacatatctatttcttattataatttctatattcgttggcttaatttcaattagatgatgtgaaaaatggtaaaaataaaaaaaatgggtacattacataaactaaaacaaaaataataaaatacaagaaccatttcaaaataaatatagggatgaaaagaaggagcaattgtaaggattaaaaaaatgttattgatacaaaagtattcattaattttacaaatgattagtttttactgaaaattttgtacacttttaatgaattccatcctcccaactatcttttaaggctgaaccgaatatcttgattataaaataaacttaattatactcatatatactaataacatggttttagcgataaaaatatatttaagttaataaaaaatataacacatgtttataacaaaaaaaaaagcattagtaatatcttttcatacatttattatatttttaatttttaactagagttttaaaaatatttattaatattctcttatttcgaaatactcacgagagtataaggcaaaatatatatcgctcaccctcttgaaaatccctggctgtcacctctgagcagatgaaaaggaacatggccagtggaataatgagtaatgttatcttcgtcttggaacccatctttcagtagtaaactacaacaaatctactcaaataagatatatttggcaatgaaggatgagaaaattagaggaaatgtatagtctatatataggaggggagggagggaatagttgggacctttcccttaattggcgccgtatagcgtactaactcaatcttttgtgaccgacttgttcttgatctgcagctcaatttccttctccattttcaatggtaaaagattgtaggctgtgaaattgaagcactgcaattattgtacgtgactatgtatacacacacacacacatatatatatatatatatatatatatatatatatatctttatttttttgtacaagtgactacgtctatatgctatgtaatgaaaagtagagaagtagatacctactgctatttaatttgatatcataatattattttatttaccataaagaattaaaaaaacttaaagcacaaagtagattcatcacttaaatgcttttgtatcattttctaattaaaattagaattttattttttagtaacatactttattagtctttaatacaaatttttataagatggattatcaagataaaatttcaattctaattaaaataaccggaaaaaatacattaaaaactataaattttgctctaatttaacctatagatacgtcaaataccgcaattaaatacaaccgctgaatgggtacgtagaagcaaatgttgtggaaaacaaaacaagaaaacactaaagtcaattaattttaaacgttacaatttattttgttcaaaggttgtcttttcactcctcctccatggtgattcctctttaatttttttacacagtatatactatataaccttaaaattaatttttagagcagtaactttaattttatttcatgatttatatatagtaactttttaacaaaaaaccatggttatgaatcatgaatattataggtaaattattttttacattaaatttttcagtcttaatcaagattaaccagtaaatatttttttattaatttatataaagtccagtacgggaaatacttatgtcgggtctttcattcaccaattaattttatatttaatttgtactctcaatagaagtcgtacatccgctattttgaagtttttttttttttaagaaaaaaaaaagaaagaaaaagtcaagaacacaactacacaagttttatttatcgtagaaaattgtggctgagttaccctgtttgccaaggtggcggtgctaagctcaaatgacattatatgtggctgttaattaattttcttaatggttgctaacagatttttgtctacagacttatggcccatcctccacggctttgccaacgctgtatctcttttaattaaaaaaaggtgttgttattaaagtttgttttttaggaaaaatattgaaaatatatatttctttaagaaaggatcttcaaaactaaatttcatattcgggaatatatttcctatagaaatgtgttacatctaactaaatatgcaaaattgacataactttacaatattttttttaccttttttaataaataataaagacaatctagtcattacaagaaaaattcgatatagcgactgaatttacgattcggaagaatccgtcacaactagagaccgatttagccactatttttgtttcttagataaaaatatgttaacgaccatattagagactgtattagcgaccatattagcaagtcacatatctgcgtggcccaataaataattcaagtcacacactctcataatccattttttctttagaggacctacatttctatctcaaaagaattaaacacattggttgctaattcattagcaaaaaatattttaaaatgtgaaaaattatctaattttatacaatatttgactacggatctaattggtggttaaagttataagaaatttaaatatatttgtgaaagcaaatatagttatgtgatattgtgcgaccaattttatcagtcgctaatgatactatcaataatatttgtgtaaagtctataaaaaatcaatttaacaaatataaaattgggaattttaacattataaatataaataataataacatgttaaataaaaaattattttactatattttataatgttataacttttttacatttttatataaaaagaaaaagaacataattgcgtcatagtgttcaccaccaagatacaaaaatgtggtgcgagagtgagaaagataaggtgatgttctcttttgttgctacttgtcatttctgtttagagtctcgatatttataaaattgttaggagtctgaattggcaagaaagttagtttcatcatgtattatgatcgtgttggaaaccctatattttggattgtgttttacatcgaatgctatcgactaccggctaggataacattctttatgttgagctcaggttaagtgttgatgtcaaagtaagggtgtttttcccctatgaagtataaggtgggttggatgtttaaggaagaagagaagacgagaatgatcatgagttcaatcccctctggtgacaaaaattaatattctaaaaatttaatatttgccaataaaataagtgttttttctgtttatatttatggattacttaatctgtgagtaaaaaaatatttagccctatgtattagatgttctagaattatgttagcatagatccaaaatgagtaatctaaaatgcatgttatatttcatattactcaatctagaattatgttaacataatttccaaaaagtagatccagaagtaaagtaacataattatggtgggagttttatggaacacaacatgcattctagattactcaataagaaattatgtcacatcatttatgaatcaacaattccaaaattaagataacataattttagatcaagtaatttgtaacacaacatgcattttgtattactcaaactgaaattgtgttagcataattctagaattgttgatatggaaatgatgtaacataatttcaaattgagtagtccaaaatgcatgttgtattctgtaatacttaatcggattgaaaaaaattagaagaacactaaaaaaaaattgctcattttaaggagtagaaatatatttaatccaaaaagttattaatagaaaataatgagttgtcaccaatgttttcttttaaaaggagcattggaaaaactctttaataaataaaaaagtcttcaaaaccaaatattagaattcatgagtcaattatttgtaagaaagatattaacatcctatatctgtcgtaaaacaattacttttagttaaatgtgtaaagttatgataatttataaatatttattttatcccttaaaaaaagcaagaaaaagcgtttaagtgttttttttatcacttagatatttttttcatcttgcaaatatgatgtttttcacttttaaatcctctaagttttgtttttcattttttaagtttaaaatattccttgtttagaattaacaacaatctcattctaaaacaatatttatattattgataacatgacttggccatgtatgacaaaagttaaaactgtcaaaacaagtaatctgactcaacccagtttaacctattggtcctagcatgaaaagtgaatagcctaggaaggctcctatatatagactaaaggttaatatgtacccgtttgggtaaggattgagttgtaagtcgtgtagccatgatattattcagagtttattatccatattttagttagggtttaattacgctttaggttcccttgtgctctactttctgaataaataaaaagatatggctagcctataatagaatttgtacaatagatgatattcaccaatttatttttctcttaaactcatcacacaggcacgaagacgtgtattatacattcaacaacactattaatttctacttgctaaatatctcgtggtatgaaagatcatggactcatgcatggatgggaatccatgcctctccagacacaagctgttttatttcatgaaattaaaatatctaaagtactaattaagtagaactgcatcgtcttaatcgtgagtcttgtcttgagtttgtgcagcaacagcttcgccagcgttatagcagcaccttctgcaacctccgttgtatgtccggccaccgcaacagccatagcgacagtagccaccaccacggccagggtagccgccaccatgaccagggtggccaccaccatgaccaggatggccaccaccgccatggccaggataaccgccaccgccatggccaggataatcaccaccattcccaggatagccaccgccatgacctgggtaaccccctccatagcctccaccgggatatttggcatcatccactccatttacctctttaacaaccaccaaacacagttagtgaaccatttatcatagaaaaattatgtttggacatgggtggaaaagttattatatggtcaatgaccactatatagtttacggtgatctcaatgcaactaattattatgtaaaactaatattgtttcaatttataaaaaaataaaattcaattatttgtaatgtaaaaattgtctcagatgacttttgatgtattactttgtgtgggaagaaaatgataaatgtaattggtggcctgagggatgaaaaagaaaaaagaaaaaggtgaacgtaaaaattgaagtgttaaataaatgaaaaatgatacaacacaccgaaaggagatttatgatccaatgaatataatttgaaacctcttgtttttgtaaacattttttaattttttataaactttttaaatttaaatattttaattattaacaaatattttagggatattaattgagaaatcaatgagtatttttttactaaaacattgcagtgaaagtactatagaaattacaacaaaaatatatcgtagccttcttttatatatatatatatatatatatatatatatatatatatattctttaaccactttaaagacaattgttaattagtatcttttactttaaaagaatcataagaatataattaactagagatactattaaatgatgtatagcttaccctcttttgcattcgtggatgccacctctgaggagaccaaaaggagcatggccgaaaggcctaggatcagtaatgccatcttcaaacccatctttcagtatagaagtttataaactacaacgaatgtattcaaatgagatatgcttggtaatgaaggatgagaacattagcgggaaagtatctctatatataggaaaagaggagagagaagtagaacctttctgttaacttggtagttgctatgtattaattcaatcttatctaaagagttaataagaatcgaagagttgttcttgatctccagctcaacttccttctccattttgaatggtaaaagattgtaggctatgaaataagcagagcaattattgtacgtctatatcaacctgcaataatgtatatcaacttgctatgtactgaaaaagtgaagtaaagacgcctgctgcagcctgctagtttatatcacaattttattatatttagcataaagtataaaatattataaactgtatgtcgaacacttaatccaacccatgcatcggttaaaaagactattttttatcttaacctataattaacttcaagtttgagtaaaatataattaaaaactccgaatataatagttctaatcgactccaacatgaatggtcagtaaaaagaaaaaacacaacactaattacacgttgcagtacgtttgcttcagctagtgtctgttttttcacattctccggttgtaattcctcttggaaaaaaaaaagcaaaaacatatattgactcccttttttttttaattcctttatttctaaatagaaaagttaattctctaacttttcaaaatttttagtccaattgtccaaataaatgccttgatcccatgtgacataacttaactgcaggtaatgaggtatatagccattaatctgaacgatcaaagcattaatttgaatggttaaaaaaatcactgattttgaaaattagggaacgaaaaatctttatttaaaattggagggaccaaaactgtaaattaataaaaaaatagaaaaataaaaattattttctagaaagaaaaaaaaaaannnnnnnnnnnnnnnnnnnnnnnnnnnnnnnnnnnnnnnnnnnnnnnnnnnnnnnnnnnnnnnnnnnnnnnnnnnnnnnnnnnnnnnnnnnnnnnnnnnnnnnnnnnnnnnnnnnnnnnnnnnnnnnnnnnnnnnnnnnnnnnnnnnnnnnnnnnnnnnnnnnnnnnnnnnnnnnnnnnnnnnnnnnnnnnnnnnnnnnnnnnnnnnnnnnnnnnnnnnnnnnnnnnnnnnnnnnnnnnnnnnnnnnnnnnnnnnnnnnnnnnnnnnnnnnnnnnnnnnnnnnnnnnnnnnnnnnnnnnnnnnnnnnnnnnnnnnnnnnnnnnnnnnnnnnnnnnnnnnnnnnnnnnnaaaatatatatatatatatatatatatatatgcagtacaacttaatttttggaacagtaactttaataaagtcgtgatcatttacgtgttcgatcaaattagtccaaaaagagaaccattcgaattagaatctagaatctccaataatagattgttaaccaaaattttgtatggtgaactgtaaggccattcttaatagtggttaagatgtattattggaattggcagtaagatctacctggagatttagttctttgcaaaattactaagattcatattgtttctcaaaaaaataattttcttttgtccatcgtgtacgataatttcttttttatttctatagtttctatttctactgggtagggtttcacttgaaacaataaatattttaattattaataaattgtatttccgttataaagtatttttaaaattaaaaaatataattaattatttttattattttaaaataatttttaaatcaatattaaaatgtgagtttcttgtgggatctacaaaaagatttaagatcttaaaataaaaggctaattattataaataatataaatttaattaatatttagcaaaagggggcaaacccaaaaatatttaggaaaatggggtgatgcaacacgcccagctggggcgtgtttaaacacgcccagatggggcgtgtttgctcccctggcgacacgtggcacagaaaaatgggggtgcagggttttcgcggttttttcgtaaattacggaaggctataacttttgatcgggacgtccgcttgagacgaaaccggtgggcacgcgctcgaaatcgagaggagaaggcctgggcaagttcccaaaggggacttgcccaaaaagttttcccaaacgaggcctctaagtgcctcaaaaatgcgattttgtctttcagcctctaaaaaattgctcgttttttattttttatttaatcagttagtgaattgcatgctgttttttattttttcaattactccattcaatttcgagtgctttgacataaaatacgcctacattggacattcctacaaaaaattatgactgtttaaagtataacagatgtaatttcttaagcatgtatatatacgtcaagcatatttgttgtttcttgtcgtattggatggtaggacaaattacatatataagtagagatggaaatgggttaggccatctatcaggggcttttggctgacctatttaaggctaggttaaatctttttgaaaaacctatttaaataaaaaggtcaggcttaacctttaaaaaaaacttattaaacctatcaggctggcttatttaatatatatatatatatttatttatttattgtaaagtagatttttaatatataataggctcgtaggtcaagccaagcttttaaattggctaggtcagacctaaaaaacactaggtcagacctaaaaaaaacctatgatagataactaggataggccaagctttacatttttaagtcaggcccaagccaggcctaacgacgtctgacctgacctgtttccacccatatatatacgtcaaggaaatactttaaacagtcataattttttgtaggaatgtccgatgtaggcgtattttatgtcaaatcgctcgaaattgaatggagtaattgaaaaaataaaaaacagcatgcaattcactaattgattaaataaaaaataaaaaacgagcaattttttagaggctgaaagacaaaatcgcatttttgaggcacttagaggcctcgtttgggaaaactttttgggcaagtcccctttgggaacttgcccaggccttctcctctcgatttcgagcgcgtgcccaccggtttcgtctcaagcggacgtcccgatcaaaagttatagccttccgtaatttacgaaaaaaccgcgaaaaccctgcacccccatttttctgtgccacgtgtcgccaggggagcaaacacgccccatctgggcgtgtttaaacacgccccagctgggcgtgttgcatcaccccattttcctaaatatttttgggtttgcccccttttgctaaatattaattaaatttatattatttataataattagcctaaaataaaataatggcatggcaacggggcggggcgggggcgggtattgcattccccgtccccgtccccgcccccaaacccgctccccacccccgctcccattccccgtcgggttttaaaacccatccccatccccgtccccgctgggggtcgggttttccccgccccgccccgcccccgctatttgattaaaatttaaaaaataaaaaaaataatataattttttttattgaaaaatcggataaaaaagttaattatgtaacaaaaaaataataataacaaaatcatatttaaaatatgggatcataattttaaaattacaaaacaaaatcaatcaattcaattaaaaaaattagaaaatagtattttttttatttttttattacggggcggggagcgggggcgggggcgggggcgggggcggggcgggtatcagtaaccccatacccgcccccgcccccgcttttgactatcgaggaaaacccgaacccgaacccgaacccgaaaaattcagtttttccccattaaaatcggggcggatttggacgggtacccacgggttcgagtcccgttgccatgcctataaaatatactattgaattaaaaaatttaagagatcttaaaagtgatgtggcaatgtgaagtccaccaaaaaagtggttaaaaatctaatcctagtggagatgtcctaagagcattttgaataaaagattttataagaagatcttagccttaagaaatcatcttactaaaattcatcattggagcatgatattaaatttacatgtagagatccaattcttgtaaaaaaattgtcaaaatctacatctatttaaaaaaattaattttttacttcctctttcttcacaaaattgattttcatctaatttttataaaacctaaaaaaaatggtttaagatattaaaataatctactaataaagtagaaaatagatgagatgttgaaaatgatataacactacaaaattaaaaaaaatggtttaagatattaaaaaaatggtttaagatattaaaataaattgcctctgctgcgccactagaaggatttgatgaagtgttggatacatgatggttcatcataataaaacttacaaaatcaaacaaatcctatctacgcctttatgtgcagccagtagttggatctagagaccatgttttctccaattgtcatatatatttaatattttaatatatttatatatatagtattaaatttagtgataattatttttttaattaatatgcttttaatatataaattcatttaaaaaggtatgcatttaataaatacatattttgtttataaattttaataaatatttatatttataatataataaaatttaatcatataatacatttaataattaaattatataagaaaaacttccatatttttaagcaataataaattagttcatttgctttacgtgcaggaggtggctgactaccgacgccaaaaataataatgtatttcttttggcttatatttttaattaagtattttagataatttaatataaattaatttaaattcaattacataattaaaaatccagtatatataaaaatataaatattttattatcatatatatatatatatattgtttctgaattttagtaactatatcatatttataatattataaaagttaactatatattatatttaacaaataaaataattaaatttatatacaaaataattcccttatattttaaacattaacaaaaataataaatttttaatgtacattttaacacacacacacatatatatatatatatatatatgatatttaataatttttattaaagataactatatatcattattggtaaatacaaaaattaaaagtatgaaatgaaaaaaaaatgtttaattacatatttatataaatatttatgctcaagtctacttatctttcataatttggttattttaaaatattttttataaataataatgattaaaaataaggtattttatgaataataattaaaaattggattttttttttatatatatagcacgtacgaagaggtaaagcaagtagatttgtttgattttgtaaattttattatcagcaatcagatgtatcaaacggtccgaagttgttgtagaggggctgcagaggcaatatgctagagagaatccgaacacctccttttgggggtagattagggtagatggaggagagagagaaaaaaagaagaaaaaaaatagagagaatatgataaatatgatatgtgatggaaaaatgtaaagagaaatagaaagaaaaatgggatgaaaatgggttgcaagaaaatgaatgagatgaatattattactcataagattatgttagaatttaaacacaagaaaaaattaaacacaatccataaaactaatttattaagtgtaaaagtcataaggatggattaaaacatcacattaaataatttattttattgaatgtgagatttctaacattatcattcttttaagaattaacattcattatgattttcactctatcaactcaccaatttagtattcatgagtttgcaccttagtccagcctataggtagcattttttgtaatccaactttctacgaaaaatatcaatttggacttaagcatataagaagagtctaattcaaaattctagtccattaagtgaaaaaatatctcaaaacttaaccaacgtccacaataacttttactatgtcaacattgataagatagtaacccttttgcctttaaaaactttactcatttatcagtatttagtgtgcacatgaatccaaatcttttttgtaacttgactctcaaagaaatataatggctcaaggtggactaagataccatagatcattggattaaactagaactttcagaaaagcacttcctaaaagtttttgtctttccatcaatgctcctccttgaaagatatggtttgtaataaccattttttatttcttttctggcgtacttaatagattttgttagcaccaaatcattacaattttttttttgtatttttactttaataattaaaattattttattaaacacaagtcatagagtccctatatctcaatgatttggatttgctcaagattgtcaagctaagaaggctcctataaagactaaaggttaatatatgtacaagctttggttaggattaagttgcaagtcgtgtagctagccatgatattattcaaagtttattagccatattttacttaagggaaattaaagcggcattgacccttcttcaattaagctttaagtttctgagttctttgcttggaataaatagatatggctatatataattaagggtcatctataagtatatgataactataaattaaaagaccaaacttaacaatagtggataaaataaacgatggtgatataataacgacagaaataaaaccacgatatttaagacaaattagaatttctacaatagatgatattcgtcactttaattttctcttaaactgatcacacatgcaaaaaggcgtattacacatattgaacactatttctacatgcgaaatagatctagtggtaagaaagatcacggggaatccatgcctctcgtgacaccagattttattcatgaaacatcttaagcattacgtagaactacatcgtctcaattgtgagtcttatccttagtttgtgcagcaacagcttcaccggcgtagtagcagcaccttctacaacctccattgtatgtccggccaccgcaacagccatagcgacaataccctcctccacgtcctggatagccaccaccacgaccagggtaaccaccaccgcgaccaggatagccaccaccacggccagggtagccgccaccgcggccaggatagccaccaccgccattgcctgggtaacccccaccatagcctccaccaggatatttggcatcttccactccatttgtcactttaataacaacaaaaccgacttataattagtaaaccatttaccatccaacaatgatttttgggaatgttgaaattattacatgatgtcagaccatcacgtatttaatttgggtcgcgattaatttatatgtgatacataactaacttatttaatttatgatttttttaataaaactcaattatgtatgtgttaattacatgaaaattatattgtttagaatcatcataatcccggagcaagtaattatagtttttctattgaatgtatatactttatgagggaagaaaaagaaattgaagtgataagtgtaattggttgttggaagaaaaagaaatatgaagatagaaaaagatattaggtgaacataaaaattgaagtgagagttttagatgataacaaaatatacactcaattgaaaaaatatacaaaatacagaaagaggagtctattatgatcgaataaataggattagaaacctcttgttttgtaatatttttatttatttaaaggttacaacactaatatatattttagggatgttagctagtatagaaattaataaatgttatttttataaaacaatgcagtgaaagtactatagaaattaaaacaacatattgttgcattctataatttttgtttactctttaatgagagtgttttaaagacaataatatttgctagtattttatctttaaaatattcataaaagtacaaggcaattaaaatgatgtatatataggttacgtaccctcttttgaattcgtggatgccacctctgaggagaccaaaaggagcatggccaacaggcctaggatcagtattgccattttcaaacccatctttcaatagtaaactagaaatgagatatgtttggtaatgaaggatgagaaaattagtgggaaatatatcctctatatataggaggagaggagagagaagtagggacttttctcttactaataagttggtagttggcgcgtaacgtgtatattaattcagtcttatctaaagagttattaaccgaagagttattcttgatctccagctcaatttccttctctattttgaatggtagtaaaagattgtaggctctgaaagtgaagcagggcaattattgacatgcatcaacctgctacagattatcaacttgctatgtactgaaaagtggtgaaataattacatgcatcaacctgctatatactatcaacttgctatgtactgaaaagtggtgaaataaagacgcctgctactagtttgctatcataattttattatatttagcataaagtataaaataattattgtaaactgtatgtcaaacacgtaacccaacgcatacatcagttaattaatacgagactattttatcttaacctatatattgttgaacacttacgtacattgcatatgttttcttcaatggttgttttataatgttcttctttgtaattaattctttttggaaagaaaaaatatatcgtatagattcaaaattaacttttgtagcagtatctttaattaataaagttgtgatttacatgttaagcacaagtataaatagagaaatattttatatatatatatagagagagagaatttggaatctccatcaataggggttaaataccggtaatatttttacatcaattaattataaataaaatttaatatcacactttaattaaaaatattaagattctaatttataaatctttttatttatataatattcaatattttcatttttatccgtaaatttctttcacatgctaagtattatgtgaaagaaacacatgcatnnnnnnnnnnnnnnnnnnnnnnnnnnnnnnnnnnnnnnnnnnnnnnnnnnnnnnnnnnnnnnnnnnnnnnnnnnnnnnnnnnnnnnnnnnnnnnnnnnnnnnnnnnnnnnnnnnnnnnnnnnnnnnnnnnnnnnnnnnnnnnnnnnnnnnnnnnnnnnnnnnnnnnnnnnnnnnnnnnnnnnnnnnnnnnnnnnnnnnnnnnnnnnnnnnnnnnnnnnnnnnnnnnnnnnnnnnnnnnnnnnnnnnnnnnnnnnnnnnnnnnnnnnnnnnnnnnnnnnnnnnnnnnnnnnnnnnnnnnnnnnnnnnnnnnnnnnnnnnnnnnnnnnnnnnnnnnnnnnnnnnnnnnnnnnnnnnnnnnnnnnnnnnnnnnnnnnnnnnnnnnnnnnnnnnnnnnnnnnnnnnnnnnnnnnnnnnnnnnnnnnnnnnnnnnnnnnnnnnnnnnnnnnnnnnnnnnnnnnnnnnnnnnnnnnnnnnnnnnnnnnnnnnnnnnnnnnnnnnnnnnnnnnnnnnnnnnnnnnnnnnnnnnnnnnnnnnnnnnnnnnnnnnnnnnnnnnnnnnnnnnnnnnnnnnnnnnnnnnnnnnnnnnnnnnnnnnnnnnnnnnnnnnnnnnnnnnnnnnnnnnnnnnnnnnnnnnnnnnnnnnnnnnnnnnnnnnnnnnnnnnnnnnnnnnnnnnnnnnnnnnnnnnnnnnnnnnnnnnnnnnnnnnnnnnnnnnnnnnnnnnnnnnnnnnnnnnnnnnnnnnnnnnnnnnnnnnnnnnnnnnnnnnnnnnnnnnnnnnnnnnnnnnnnnnnnnnnnnnnnnnnnnnnnnnnnnnnnnnnnnnnnnnnnnnnnnnnnnnnnnnnnnnnnnnnnnnnnnnnnnnnnnnnnnnnnnnnnnnnnnnnnntcttatttgtatactgaatcttcttacctctttatctatttcaatctatattcttttatctttatccataaattaaatttcagtaatttaaaaatatcaataaatataaatgatcttatatcaaatttaaactattcaaaagatattaaaattatttatttatcatgataattatacacatttttaacatattatttttaacccatattttattattttatcattttctttatttgtccattgaaaaaacatcaacttgcctacttgaattttaaaagtttaatttttttaattatattctcagcttacctaattttaaatagtgtaatttatgcacatattataaatgataaaatataatgaaagtcatattaaaaagttaaatgtcagttacattctttagtttatgtaatattttcttaagtgaataaatgaaaagaaacaaaataagtaagtatattttactaaaatttatcggaatttacaaaattaatttgtgaacctcattagaaaaataaaaggactcgtatataaattcattaattttaataaatttcagtaaataatataaaatatacaatataaaaaaattaagatcaaacttttgagtcaatgctaaatacaaagtaaaaatataaaagatggaataagctagtaacttttatatttaattttagtgcaataaatattttttccaaataaaaatataagtataatttttaagcattaatatttacagtaacaacatctcatcagaaataatgttaaatgtgtttttttaattatttattaagagtataaaaaaatagtaacatacagtactatatcaagaaaaacagtcgctttaaatattggatccgtggcaggaatatgtatttattttgccatgctgcccatgcagcaggtattctacgttatttagtgcgaaagacaattcaggccatcaagtcagacggtgatttagtgagtctttagatacccgtttaactcacgttgaatgaaaaaattgtgctttcaaatgcaagaacgtaaaagtaacaaggtacttactttgaattcaaggaacgtttgagaccggtgaatgttaaaacaaacacactaatgatcaatggcgcaaaaaaaaaaataaaaaaattgcatcgagtcttcctccacactccacatacctaatctctaacgtttcaaattaagtaaaatgctttaatgcattaaattcccagacgctcctgcaacacgtaccgtacaagtgttaagtgtacaaccaatgtgaatgtgatgaagtatgtaacctttggcttgtggctgtggctcatataatattgaatgagaaatccagtgaaccgaatctagctagatagcaactccatcaatggactcacgggatgggaaggacgaaaaagttggactccgttgctaacattatttaaatgggtaattatcataaataatgacccatgaacccactagcttaatcatcagctttcttttgatcctctcgatctactggtaaaatgtgacaagaaaataatcatgctgtagatcaataatggtgagaaccgatcactactagtacaaaaagtaaacgttttttttatattcaccaactatgcctagctatgtttggctttgcacttgtactaattattgtcattcactttcacttatttcatcatattattgttttttttttcagacttgataatgacttgtaattttgttttatgagactnnnnnnnnnnaaagggagtaattataaagctttatcagtgaaatccagtaaaaaaaataatttaataacatggtgcttcatttcacaaaaaaaaaaaaaatgaagagaaaattgaaattaaattcagatacatgtcgttattctgtatcccatactcttcacacaacacacttaactttgactatatattgatgcattaaatgtaatcattattgttttagcaatttgtagtcaaattcgctatatcttgcattcccactcaaccgcataagttaaatcatccacatgacttgtcaggctttctataacaaatgtcaactcaacgataagatcactcacattcacgaacaaaatgtaaacgtgtctgctgctttgagtgtctaaaacatttattttactgagtaattacttgataaaaatcaacaattactaatattttaataaattacaatttgttatatatgtacatttttaattaatttatttgtgattctcaatttatataagaagaaagaatatcgggttgagtttttttaatgtgaaatagtattagatttatcataagtaattaagactgaaatacataaattagtaagtttttaaagaagccttgtaatgttttttaagtgaggttgggacacacctttttagatttcaattgaaataatatgatgctaatgatggaaacctaaaatctcctaaatgttttgtgaatagaagggttgccctgcaaaaccgatactctacaatgagctaaatagaaggggaaaaaatgtaatttctacaataaaaaatcagataaaaagaaagaaagaaagaaaagattaaaatgagataaaagtataatttgtagataaaatagctaatgtaataaaaaatagaaaaaataataatgcctaaatgtataggcacaaatagtgtaattttttttacattattatccaatatttacaaaataatatataaggtaaatttgtttgcttaaaaaataatcacattaatagtcatactcatacgtagcataatttcttacatgttgatagtataatatatttttttatgctgacaatgttttaaaaattannnnnnnnnnnnnnnnnnnnnnnnnnnnnnnnnnnnnnnnnnnnnnnnnnnnnnnnnnnnnnnnnnnnnnnnnnnnnnnnnnnnnnnnnnnnnnnnnnnnnnnnnnnnnnnnnnnnnnnnnnnnnnnnnnnnnnnnntataaataatataacttaaaaaaaaaatcgaccaaacatatcgataggatagcatatttattttgttcagcgaaaggccgaacactaattccatattcaattagtgaaaaatgattatgtattaattccatattcaattagtgaaaaatgattatgtaaaataaaatttacactgtcacttaattataattcattatatacgtaggataaatttattaacatgtaaaataattattttaaagtaatttaaataataatttataattatataataatataatattattttataataataatgcatagacattaaattcattaaattaatagtgggttaaaacaaataaaataaaataaaagtaatggtggactaaaacaagacggaacgaccaaatcaaaactacttgtgggctaaaaacgagtggccgcaaccaactcgcttaacattaaaaatttctctaaattttaaaatagtatacaagaaacgatttatatatatatatatatatatatatatatatatataagtgtattttcctctgttataaaaaaattaaaaaaaggggcacatatttttaggaaaaagagtgatttttatattttttttatgttttaactcctaagagaggaattggataagttaattttcaaggagtgaaaataatattctatgtgtaaatcttttattttatatttttaacttcttttacatctcactttcattgaaagattttcaatttagtaatcaaatagtatatatttttaaagactcaaataacaatttgatgcctatacaataccttgtttttgtattggtcctttaaagatttttttaatctttgtaaatttataactttttattttagtctatgttgttaaataacaactttgaaatgatgattaatgatattaagagttcattaacttgtcacaatcattaagagagtatttgtttcaaagtttaatattacattctcgggaattatattccttgaaatactatgctgaatataatattcacataaatttttcggttggtatttgataatttcataaaactatttaattataaaaataaaaataaaagaagaaatggaaaaaaaatatagcagaaatggatagttaacttctatttccatggaaatatatatactcgattatccttcattatggaaataagaggtgagacaaatatgagtatatcatattcctacaatcaacaatgtctggaaatataattttaaaaagttttaacaaacatggaaatgtgatatcatgtgttcacattttttagattaatttgtaatatcttgaaacaaatacaactagtctgattggataattacatttttttaaaaaaacaatatttttaatatttttatatatcaccaactattttcaacatataatttaaaaatatagttatatatatgtgtgtgtgagattgctctatcagatttttttttttataacatatcaagacaacaaatttggtcacgttattgttacatgataagttaatgttattacagagtttgatattacaaacaaagttcttgaaaattaacattattaaattttcattaaatattgtaggcatgttagttgtttccttccttccaagctctcttatttttatttttctttcatgaaaccttatttcctccataaatattacgccttattttgtattcttttatatttgattaacaagtacgattttattttgtaagaacaaagcatgttggagatgctaattctttggaagtggctgagatgatatcgaccggctgttcgaacaattaggatgaaccctcaacttaatagtcaatagttgttgtctgcttataatgctcaagttaacatgagtacttgcaactttggcaaatttaaataaataatattttttaataaataatttgaaaaatagtgtaatttggaaaatattttgaaaaatgggattgtcaaacacgtacaaattggacgtgtttaaatacgcctgaaaaaataaaaaaataaaaattcgtcggtaattctgtcgttaaatgtttgcgaccgcaaattccgtctctaattcagtcgctaagtgtttgagaccacgaattccgtcgcaaaatgtgttagctactgaaattaacatatgactttaaaatcaattttttaatttacactataatttttttcaatttttgaaattagtgttgcgaccacaatattgtgattttttaatttttttaagaaatcgtttaaatatttatagtataattttgacaaatacatataccaaaaaaatattaccttattttgattatttggcaaaaaaagaatgtgtataaaataatatatatatatatataatgatattaacacaaaataatttgaattatcttaatttatataatccatcaattattatatataatttgaagcaatcattcaaaactatattagatatactatgtattttacgtatccaaaaatctattttatatttaagaagtctttgtgtaatagaacttttatcatatcatagatagatgagtgtcaatccatgataggaacccctatatacaatgtcttgcccactctagcattggattttattttcaaccactattagttcctctgatatataggatgttctcaacttgtaaaatcccgacaaggtccctgccactaattattctcttttaaaatcgaaactcttttgtcatgctaaaattttaggtcacttttattagtttatttttttaaaacacttatttaaaaataatttaattaattttggatgagaatttatgactcatttaaaaataatttcgcttttagaaccgaaacaccgttgtgccttcgactatggcgagcggtagtcgaagggactgtgagaggagattggcagaaatctagtgtggaagagcccactattgcaagattaatcctaggatttaaaatcatgctccaatatggaccacatgttaaagtgatccacgtagtattggccagaatttaaatgctagttaacataaaattcaaaattgtattggctaggaaatattttttaaaaccaaaaatgaaaaaggaatcaaacacaccttagtcttttaaatgtgttgatgcaagtggaaggaactcgaatcattcaaacatgtgatcttgatcttaaaaaaaaaagtattgtaataggccttcttttaataaacaaataaaataagaatattgtttcaatattaaaattaactataaaaagaaaccttgatttaatcaatttttaaacataacaatgtacttatacttatctacatttagtaaccgcaattttcaattttcaaacacattttgtgacggaatttgtggtcacaaacacttagcgactgaattagagacaaaatatacggtcgcaaacatttaacgacggaattttttttttcaggcgtgtttaaacacgcttaaattggatgtgtttaaacacgcccaatttggacatgtttgacagtcccatttttcaaaatattttccaaactacaccatttttcaaattatttattaaaaaagtattatttatttaaatttgtcgaatttcaatagtagagtttaaaatactttgtttggatggtaggggtgaacaagagacagatggggtcgggttaaattcaattttaaccttctgtttctaaattttgatcggatttagatcctaatccatttctagacttaaatgaacctaatgatctatgatttaaattaggataggatctatttaagacaagatcaagtttactcgaaacataagaatgtgagttctcattttctattaatgtaattgagatttcaagaataaactttatcttatttttatacacgatattataaattaaattatagttacttgtaaccataaaaaatagttttgacatcaatttggaaaatatagacaaaaaggagttaatatgttagtcttttttcagtgattaacacaacaaatgaaatgcactgtaaagatataataagggctattaaatttaagatctggcaaagaaaaaattgggatagcttgtgtttaaccctaacctatccctaatttctgaccaagtcaatattctaaatcctaacttgtctctaagcctaaatgaatctaatgatttaacgggttaaattaggatggattggaggatcttgcaccccccccctattgagtagaatatttatacaaaaaaagagggtggcgtgggtggataacgtaagtggaagaatgatgagacgttttatcagtctattagttactttcacacaatttacgagttgagaggagttagagttatcccatacctaaattaggaagtaattccataatttgcaacataaaatccactcttagcaatgtatgattttggacatctatagtacaagtcaacaattaacgtgagttccatgaaatgtatctcagttaccaaggtggaaaaattcaacatatcatttgtggattttgctggaatattaggtccttaattacttggcctaatacaattttgccaactgttagaaaattgatcactaggctatagctataaagttgtgtggagcaaacaatgaaggaaactaactgagtaatcaaattaacaggtaaaaatcaaaattctactcatcaacgatttctaaccaaatctttagtcatccacaaaaaattcaacctcccaaaccaccgacaaagcgcgatcaacatcataataatcagttaatcacccaacacgttcctatgtgcagtattattacaacaaataaatgacaattataatcacaggaatgaaaccagttttcataaatagacgtttgttcctgctaaccatatgatgcaaattaattaaaatgaacaaggtacctagactatatatatatatatcgtctaaattctctcaaacaggaagagtcggggaagcatccttaaacgggttaaatatgaggttttttgactgagggggcaatttttttttttaattaccctatgggacaaaaatttataaaattatcatttgggggtaagtgtaccacttatcacggcttctaaattagaaatcgtgttatgtgtcatgatctttgtttttcttcatttgaagtcgaagtcaaatttactacttcaatatacttgttattcaaaagtcgtaaatggatttataagtcataatacttaatttaatttttatttttgaattttaaaaagaaaatactttgaaaaattgtaaatatatttacaattttaaaatcgtagcagttacaactttttattcatttgtagtactatttacaactttattcattttttattcatttaaagttgtaaatactcttacaaaagcaaattaccattattgtgccaaatacttaattaacataattatatttgtaaaaattacttaacaagaacaaattaaatataacttatttcatatattaaaagtaaatattattatcaaaatatttaagtattttaaattttaaattttaaaaattacaaatatattatacaaaaataattaaataaatattcttaatacaaagtaattataacattaatttcagatatatttaataaaaagatatcaaaattaaatacaaaatattaaactaatttacaataattcaaaatgacttgcttttttaaataattaaattaaacaaatttttaattctttaaataaccaaaaactaaaatacaatataacaaattcaaataatacaaattataaaaaacaaataaaaccaatgagttacgtaacccatatatataacaataattttaaaaaataataaacaaaaaatannnnnnnnnnnnnnnnnnnnnnnnnnnnnnnnnnnnnnnnnnnnnnnnnnnnnnnnnnnnnnnnnnnnnnnnnnnnnnnnnnnnnnnnnnnnnnnnnnnnnnnnnnnnnnnnnnnnnnnnnnnnnnnnnnnnnnnnnnnnnnnnnnnnnnnnnnnnnnnnnnnnnnnnnnnnnnnnnnnnnnnnnnnnnnnnnnnnnnnnnnnnnnnnnnnnnnnnnnnnnnnnnnnnnnnnnnnnnnnatcacaactttcaaactaacttaaataagttaaatactttaaaaaataataaaattaataaaaatttaaaaaacacgtacagtcataaacgtttttactacttttgaattggcatttaaaaaaattgtttttttggcggaatcgaaaatgcataatgaaatcataaaattgactatgacttcaaaagaaaaaaaaagtaaaggtcatgacacatgacattgcacgacttatcccaaatgataattttataaatttttgagcccatgtggtaattaaaagaaattacccctatgtaaaaaaacctaaatatgattgaaacgtggtgttgagagaggcatggggatggaggggggaaaagtaaattgcttggccagaaatatcattttaataatgttcagcggaagtttaagtgttaaattttaaagacttagttataaacttttaacattataataatttaattaaaaatttaaatcatagaaaaacataattaatgaaattaaaagaatatatcaatttaagtaattataaatatattattttttaattaatttaataaatgactatttctcaatttattatctatttatattataaatctaatatatggctatacaaatgttatttttcttaaattttaatttcaataaatgttatatcttctaatactttcactaaatcttcttcctggtctctctttttactctttcaaaattcaaaataagaatgtgttttaaaaataaatccaattaataacctaaataatcttattatattattaggtaaaaaaatgttcattttcatcacaatgttaatattttaattggttgatttgtaatatgagaaatattgatattacattctctaacagtaaatttagtaggaaagaaagaaatatgttaaaactatgatggattgaaataagaaagagagaaatagagtaaatgaaaatagatgaaaaatagagtaaaaacataagtgtttgatttaaggaaaataagaaagaaataaaaaagaaaaaaattaaaaaattcattaataaacaatctttttaacaaataattgattattttatatgactgctgctttttgaaaaataattttatgcgtttttggtagtttttgaccaccaatacatttctatcactaaatgtatttttctagtaattttcaacttttgttaaaaaattatcacaaaatgttaaacattgacatttttactatttaattctgttcatttttgtgaagaaataaaaagatgcatgtgagactcgcacttttttttatttctctcactagttatttatcctctaataaacacactctattttttattttcctctatttcaactcctcctccttatttcttcttcatagcatccctaccaaatatatcttaacttttaaatattttattattattgattgaaatttattagaaataaacaaaaattatgctcttattattttacgtgtctaacttgtgattttctagtttctaaaagttttaactaatatataaacgagtgtgttgacgagaaggttaaaatataaaataaagagtgtgaaagttgataaagtgaaatatagattgagaaaggacatattagtaatctggtcatcatttattatttagcaatttattcttgagaaatatttttttagttacaacaatgcttaacttattaacagtttatggttttgagttaacttagtggtttcggcccagcatctcaacgaaaataacacaaacataactggataagactaatgggtctctcgatgggttcacaaggaaagagacaaaaagcccaaaaacaatggaaagcatgaaacaagactgacgcaataaaaagacaacaacaaattatacttcctgttcttattttcatcttacatcaaactctcctaattttgtatcatttattatactgtgactccctaatccccaaacaggataaaaaaataagtatgtagaaacaagaagcaaaaataagtacatatttataattattattttttaaaaccaaccaaatatgtgttgatctaccagtgagtcaccccttttatgtaaacttatagaataatgtatttaattatttattttagttgattaatttcatttattgttaatttagtgtttttagagttgatctcaaacccaaatcaaacaaaaaaggaaattaatttctgagctttatgttattagtcctataaaattcctcaaaaaatagtccttttattttatataaaaaaagcctgggcctataaaataacagtaaaaataaaatcaaacgaaataacataaaaatatcgaacaaaactaattgttgacacttggataacgtaaaagatagattttaataagtcaagatgacatttttttaactagaaggtatctggacttctattttttattgatgtaagaagcaagggaacaactaatagttgagatcgccagatgctaccttttttttaattacttccattattgtattttcagaaaaagcataaattgaactctatgaacagaaaccaaaaagaatgtagcgcggcaagcatttaagctgaatttcgtccaatagattttagccatgatgcaacatgagtttttgtccctacgcaacaaaatatgaataaactaaagcatatcctttgcttaatctttgagcattaaggcaccgaaagtggaggaaaaatacccttaattagagttattattatttagagtgaaacagaaatgagtgaaataatcggtgggtacccttgttttagactgcggcatatcgtttttgtgcccctagttccacaaattaaactcgtttcgttccgcgtttcacccttgaatttgcccacgcttttctcccaagactaagggacctttttgataattagaatgaagacttcccacaaagttcaacttcaaatatgcgttggccaaccgtttttgacgaagcccactgactcaaaaatcagaatgtaacctcgccttcaatagtcctaattctcccaacaaacaaataatctttgtgatcatttgactgtttaagcaacacagtgcctattacatgacaatttctctgattaattaatacttttagtgcatatagtactatatatagtactattttcttttaatattatatccatgcaactgtaatgttatttatattcaaggaaggaggatctttaaccatagacataagcacaactaattaaaaacttgaatttgaccggttgatcttagacgtctcttgtaacactattacaaaaagaccttttaaagatggttttttttttttaaatattgttcagattacaccataactccataaggttgtatctaacgaacagcaagcaaggacaaaagactcaaaattgaaatggcagaaaatgaattatattgataaacacattcacaaactatttgctaaactatacctaacacattgcagttttagaacctggagactaactaaataggtgaagaattaatgcatagctcatatagagtaattattttactatttcaaataagtgaaagttataaattattttgagaacaattagatgagtaaataatcagatacctgcattttagcctcttcccatgttaatccaaaccctttaccaaaaatctgaccatctatttcaacctcaaacatgagaaaattgtttaagaactttcaaaacttgtttaaaaattctcatgaaagaaattgaaaagccatacaagctttaattgtcaaatgaaaaagaattgaagaagcacttctgaccttatctaatttgattattccacaactttttttgttacactcacttattcattgcattttgttacactcattcattgcatgcactctatttggctatttcattgtttagttttcattcttctagagtagaggcttcacaaattcagatataactaattattttgttttatgagacttggttaaagacttccaatctaggatctgaaaatcctagatgactcagatgcagttaaaaatgagactgactcttctttaggcaataactgattaccaatagtattacaactactcgcaaaaccattgttgtttgaaccccaccaacatcatcgttagtgaaaccagaatcatccttagcatgagacatatatatatacacacacacacacataatcattataaaaagggtaaaataaaatgccacatcaagtcataattaacaaatttcgaaaagcttaccagccaattgtttgatttaacattcaacaaccttattttgggcttcccttctagttttaattaccaattccttcaccaacttttttccagcaaaccatggttatgtataagaataacatcaagttgaagcatattaataaattttcaaaaaatataatgtaggacatatttttgtaaatgacaccactgtataggaagcaacacataaccaaatttgagcctatgattaaagcaattatgaaattaatttcatataaaaacagtaaagccaacaatttcaaatctactcattgagatatagcacaccacacacccaatcccgtgtttagtaaatgtaagttatataactaataaaaaatttatcactatgttggttaaaataagtttcttacaataaattaagtatagaaaaaatagcacaaggcaaattcattgattttataagtaattttaccctaaattaatagaaaattagaaatcaaaccatatcatagataacccttatgtccattacacataaggaatccccacctatttcctagtatccctcaaccatttaggttctctcccttgaaaacattgtgttggatataccttaaatcgcgtcgttgttgtcgccgacgttgtgtggtggcatggcatcaaatttggttctgccaaggagaaaaggctttcgaagctcgtcatcgcccctgttgtaaagaagttgcacgtcttcgcctggttgagcagagggagagggagagagcgcgagagtaacaggagagggagagtgaaagagcgcaagagtagagggagagggagaaaaataaaattaaaaacattaaatgtcttgatataaatattgtatcatgcataatagaaatcaattctaagacgattttgttaaaattgttgtgaaatgactaatattctaagaaagtttttgtaaaaccataatgaaatgatagtttctaagatagttattgaaaaacagtcatgaaattgtttttttttttatttacaaaaatgttatcatattattttccacgatggtcatttatgctcaaccgatgttaaattaacgtcataaaaacacatttttatagtagtgtaacatgcaaaatacaaacatatatttaaagtataatttacttatttctttttaattccccttgcgatacacctaatacacctaaaatttaatattactaaaagaataatttatccatctttaattataagaccttttttaaaaatttatttgtccaattttataagattattttctaatttttaggtgcattaattattttttttacatactcttacttaattattctctctaaaaaaattaatgaaaaataattaaataaatagatagatagataaaaaaagaataattttaaaataataatacaaataatttataaatttaatgtgattaattaaattaactatttttataatgatagtaaattaattgaaagagtcttataattaataattgagtaatatatgaatcttagcattctagaacaaacattttcctattggcatgtgtgccaaataaaagaacccattattcaactttataaagacctcataaatatataccaacaaaccaacatggggaagcaaatggaaagcgtgtgacataaaacgtggtcggcaagcattcgaattcaaaatccacgactgaaaagtaaattaaacaacggtcacaaagaaattaaaccacttctcgctcataaaataacaaaccgctatcattgctatataaacctcaatcaaccaacacaagtttcataccaaaccaaaattcatcaatcaaaacacatcaaattccactcactactactctctctttccattattgtccccttaaaaattactctctttctctatccttaattataagatcgttttcagaaaacatgagtgtagaaatactagacggtgcaaccatcgtagggttcgtggaggacgaggaagccttcaacgtgtgcgtaagcgacctcttcacccaactggacaccgacaaggacggtcttctctcttacgcggagatgctgaaggagttgcagaggctgagggtgttcgagacccacttcggcgtcgacgtgaagcgtgaccccgacgaactcgcacgtgtgtacgagtccatgttcgtgcaattcgaccacgacttgaatgggagggttgaccttcaagaattcaaggaggaaacgaagcagataatgcttgccatggctaatggacttggatctctccctgttcagatggctctcgaacacgatagcctcctcatgaaagccgttcaaagagagtactgtcccaaaattgccgcttaaagaattaatatgcatatggggaaattttgcatccaccgcgcgcaatatatgcatgcatgcatggtggtgatatatatgattcatcatttataagctttcttacgttttaattttgtgtcattaattcagtggtttatatgtttgtgttttgattaacttttattgtagttgttggctagttgggtacttgcgcttgttgattgcttaactgttcattgatcaattagaaatgagaaattaaaaatcgtatggaataatttttgctggttctttttgtttttgtgtcagagtttaaaccatgttgcccatgctcatgtacgtatgcgagaattaaacagagaaggagcttaattaattatctatcgtgtcttctatcagttgaaaattacttctgaagtgaagatgaagatattagattgattcaaatgattagaaaaaaatgaaactagaaggaaggaaagaaaaaccgtgacttccaattcctccaactaagatttctaaaatcaacctatcattttctcttttgtctttcaactcacaccgcaccaccctcttttttttaataagcaccgcacccccgtcttctataaaaaaaacatgaatgcacgagaattaaacagaaaaggaacgtaattatatgtcttagcttctatcaattgagagtcacttctcaagctatcattttcttttgtctttcaacccacaccgcaccaccatctcctataaaacattaaattttagatagaaaatgatttttttctatcaatgaatgttagtgtttagtttattattttatgttagtgggagaaattcaaacttataacctctttatctccccttttctctttaatcaataaattgacctgataactccaacattcaaggaaatttcatgtttttttaaattaaataaatatataagatcttatccaacacttacgattgatttttaagctacatatttgtctcaattattttagtgtaaaagtgaataaaagttataataaaaaataagagctttaaaaataaaataaatagttcaatcatttttatttcttttaacttaaaggaaatatttcgtcttgtccatattataagatatagttttagaagaaattgatggtcctttttataagaaattttagaatttttatgaagcatttaatctcttttcatagttgtccttattaaatatttttaagtatttatgttttttattgatagttgtacataatattcttgaactttaatattttcacgatcacatacctataataagttaatgattattaataagaacataattagtacannnnnnnnnnnnnnnnnnnnnnnnnnnnnnnnnnnnnnnnnnnnnnnnnnnnnnnnnnnnnnnnnnnnnnnnnnnnnnnnnnnnnnnnnnnnnnnnnnnnnnnnnnnnnnnnnnnnnnnnnnnnnnnnnnnnnnnnnnnnnnnnnnnnnnnnnnnnnnnnnnnnnnnnnnnnnnnnnnnnnnnnnnnnnnnnnnnnnnnnnnnnnnnnnnnnnnnnnnnnnnnnnnnnnnnnnnnnnnnnnnnnnnnnnnnnnnnnnnnnnnnnnnnnnnnnnnnnnnnnnnnnnnnnnnnnnnnnnnnnnnnnnnnnnnnnnnnnnnnnnnnnnnnnnnnnnnnnnnnnnnnnnnnnnnnnnnnnnnnnnnnnnnnnnnnnnnnnnnnnnnnnnnnnnnnnnnnnnnnnnnnnnnnnnnnnnnnnnnnnnnnnnnnnnnnnnnnnnnnnnnnnnnnnnnnnnnnnnnnnnnnnnnnnnnnnnnnnnnnnnnnnnnnnnnnnnnnnnnnnnnnnnnnnnnnnnnnnnnnnnaaatttttttttttaaaaaaaaaagaaatttacatcaattaaaattaagcaaaatatctcatagaaaacaaaattgaaataacaccaatttaccgagactaaaattaaaaaaaaaattacatagagcaaaaataaaaataaaagtattcaaatttacatatactaaaaacatatttaaaacataaataaataaccaaagagataagaaaagaaattaacaagatattcttctaagaatggatcttcacctacctcttttattgcaaggtttatcgtcctttcatctccaactaaaactaaaaccgttgattacattatttctggattttgggtacatttttttttggtggaagagaggggattttggttacatggtaacttggttaaatagaggatctaaatttcttcttctttttaactaaagttgcttcactcaatttgttttttatcaactaaatttgtttaaaattttactttttcttatcatttttatattatttgagagttttaaaaaatatatttcaccaaattctttctaacaataaaaattaaattacagtaacaccccctcagctaattattctaattaaatatgcattatattacactggtacctcatgatcctttaacaccgtcaattttgttaactccaacagatcaagatcaagtgccagcacatgtattttaatgatttttttttttttttgctaaaatacccctctcttctttttgggtatctgagtttgaagaaaaaaataattgcagcaaagagcaacttcaaatcgaggaagaactccaaacaccatccaaaaattttactttgaatctcatattaggagttctttactttgtgattttttttaataatagttagaagtaacgtgttaatatcatgaataaaaaatgtttcaacctgttggaaaacttgcagcagcataaatttctttcaccaatattagtcaaataaaaacaaaagaacccatttgagtatgttgaatttaacgtatctcaaaaaccaactaaattgtaattgttgagatctctgtgaatattttagtggaccgctaagaagaagaaaaagaaaaggtgcactgataaaactaatgtctcgatgaaacaaagatcaagaaaatcatcatcaagcactagcagtggggaatcaaatattcggagcaaagcttttgagaagatcgaattggtgattgatgttgcgtcggagtttgggcatcgtgaatcactctaactgttgacagtggaagcggcaataccctgcagagcttgaacgcaatgacaaccaagaatggcaattttggattttcggaaaggttattctcgtaaatgctttgaaagttaacgttggattaacaccatcagacagaaggagtgtcaaaataatgccttcaaatagaggaaatatatgtgtaattaaatcaaatcttagacaatgtcagtgtaatttactaaaaacaatcctagcaaaagttaaaacaaacctagcctataattatgtaacaaaaacaaattagccttacataacaaacatcattgtcttctacccaattttttttataattaagaacattccatttaactactactaggaattgctgttctctgcaaaaagattcacacatattttaatgagagtcaatcagtccacgcgcgttcttcggtttcacctttctactttccagtcaaccaagcacaatatttaacgctaacgtcaacctaattccccatcacaagtgcaaaatggaagaaggatttcaaactgaaaatatagaaatcagctagtttccatggcatggtacgcataacatctactttgagtcaacaaaaataatacaaaaaaaaaaatcatgtatggtcagtgtaaagatgtttacactatcaatttataaataattatattaaatatcttttaaagataattattataaaaaataattaataaaattattatacattattaatttggacttgtacttaaaacattattaaattaattcttatatatatatatatatatatatacaattgttacatgtttagttccagtcatcttctcagaatggtcttaggtggagttttatcattgaccttgagttatttttccccctccaaccctaaataacttacatttcatttcaaataaagttgtgcaatccaaatcaaaccaaatctacaaaaatcagaccatttaaaatgatttttaacccaacctatttattgtttgaatttggatttggtgtgtcatttattttaatcggttttgcaacatcacattccaagcaccattgtgaacaaaactccttcattccctcaatcttgcccaaacacgtaaaccaaacatgtgtctccctctcttactacacaaatacataagaagagatcaagttattttaagagtaactctaaattcttatcctttatttttttttataatctaatgattttagtaaataacgcacttttaatcgtaagattagattataaaaaaatcaaatgaaggacaagtataagaaacacaatgtcacttttggttaagaagccatgaacaataacgacagcaaattttaggggtatgaatagtacgaataagataacattgtttggccgacgataaaaaaatgtcttctccttttgttaccttttatcggtctcgttgtctaatcattgttatttcaggttttttcatctcaaacatcgacagtggtccaaattcaacacctactgtcactaccattgtctttaacaactcctctgatataaagcagtagcatatagagcaaattgaggagaagaagacaccactaaatgatttgtgcttctattttagtaggcctggattgacaaggacgagatccagctattgtgagggttcctcgactacacctcatagcaaggattctttcaccataatgccactgttttattatacaaccaaccaattattgaagctccaactccatttcaataacaactaactagcttgaaaatgttgatatttgttgaacccatattgcataaaaagatttatgaagttttgatgataacaaacaatgaatgttacattattagatttattacactgatgataattatttgatatttgaagttactgatattttggatttgatattttgaagttattgatattttggatttataaatatcaacataattgataagattatttgaagaatcctaaagattgatatcattcaagatgacatggaattaagaagatttatttttatttattttctagattttatgtaaggagattagaagattgatcttaccaaaatattatctttaagatttcattcaaaaataggataaaatattttttaacttgcattcaaaaataggataaaatatttttaagattgcattgcataatataatagaatatctataagattgcattgcatgataagataaaatatctttaagattgcataagatcttttaggattgcattcaaaaattcgttaaaatcatatacttaaattagtataaatagaaacatatgttattgtttagagtatgcattccatttcaaataatattagagttttagagagtttatgtttgcatcattaagagagttgttgtgagatcatatagaagcgtttgacaagtttgattcttcaactctccatcaggatttaaaggtacctatttgcttaaggaatagaagcgtaaaggtaaccattttattgtattcttcttcttgactttggaagaggtcgcaactgggaaactagcgtactagttctatctctattcttggtgaattgagacatgcgacttttagctgagaaactaagatactagtctggctaggaaacaaggatatcagtctgtctctatttttggtgaattgagacaagagctttttgctgggaaacaaggataccagttgggataatagttgtgtaaggatagactaggaaactaggatactaggaactcttgtacacacaattgtcatagtggagttgtccattggattgattatccaatttggatatcgtggtttttacccaattgggttttccacgttaaaattgattgtgtcttttttatctcttatttccatattattactttgagtttgattttaaattgtgaattattttataaaactcaattcacacctcctctcttgagttcatttgggaccaacaattggtatcagagctgggttctctttattttgcaggtaactcctgaagagtagatcttaagatgaatctaatggaaacaataagataagactactctatccaaagacctccactattcgagggaaagtactacaattactggaagaacagaatcaagattttcattcaagcagagaactatcaattctggaaggtaattaaaaaaggagactttcagatcacaaagatgaatgaaaagagagaaagagtgccaaaacttgaggacgaatatactgatgaatattggaagaagttggaatacaatgcttaagtcaagagaattcttcactgtggactagggacacaataatacaattgtgtgatgggttgcaagactgtcaagcaaatgtagaatcttctagaggtaacacatgagggtacaaacgaggtaaaacagtctaaaattgatcttcttatgcatcaatatgaattgttctctatgaagcctaaagagtctattaaggatatgataacttgttttactaacatagtaaatgagttacatgctttaagcagggacatacaggttgaggagcaagtaagaaaaattctgaggagtctccctagagagaattggatgtcaaaggtcactgctttgcaagaaaccaaagattttaagactttcaaccttgagcaattggcaggattgctaatgacatatgagatgcaactagagtcccacagaaaggaagatgtaagattaaaggataaaagcattgctttaaaagctcaatcaaaggaagtgggtgatgactcagatgatgaggaggatattgaaatgcttgtgcagaagttcaaaaaacacttaaagaaccaaaagtttaatggatcgaagctcaagcaataaacaggtaaaatccaaaaccttctcttcttcaagaactgattatagttgctttaggtatggaaaaacagatcataggattaaggattgtcttgaagtagagcaagaaagtagaaaggagaagaaggctaaagagcagaagaagtatgataagaaggagttcaagaaagcaatgatggctgcttggagtgattctgattcagaggaagaaggatctgaaagcagtgaagctgaggctaacatctgtcttatggctggaactaactcagaaggtgaagacactaaggtaaattttcttgagctgatatcttccatgcatttgttaacaaagaagcatctattgaaaatgtcagactttataatagatgagtatttagaaatacgtgaacataatgatgaattgattgatgactttgatgaattaaagaatgagcttaaaaaattctctaaggctaataaagaattgagaaaaaccaacgagagcctagaggaggaaatcactagccttaaaaatatcgcttctgaacttgaaaacgaaaatgcttctctagttgttaaattgaaagagcataagaaagaggaatgtgtggcaatttgtgatgctctattggaagaaaaaattgaaaaattggaggatgaggtagaaaagttaactaaagagaataaggacctctaaaataagctagagtttgcccttaggactcccaaagtaaatagacctgatgctattgactgattgaataagaattgtaacacatttatgcacgggttaggctttaaatagaataagaaatctatctggaaaacaaaaactacgcatatggacttgtatgagaaaatggtgtgttatcattgtgacaaggtaggacatcttaaatttaaatgcaagagtaagataaaagttattgaaaagaatgttacataaataaaattctgaagtatttcaaaaagttttaattgaagtatttcaaaaagttttaattttttaatcaattatgtgattaatttcatccctcttcaaaaatatattatatataaattattaaaatctattttttttttaaatttaatatatgttatcaattgagttctatatatatatatatatatatatatatatatatattatgggaaatgggaagacttgactctcgagacgcgttttaataatgcatataggaatgcgacaaattagactaacattcaagttgtaactatcagttattctcgaaattactcggcaattttatttggacaaccaatagtgttcctttttgaacttttttatgtattgaaaataactttttttgttgttgtacatattacgtgtatccttctgaggcctacttgaggctgaattacagtaggtaataaacttatctctcactatcaacagtatatatattgaatactatcatctatctctttctctttttcaagtgcctagtaagatgggcgcgtcaattcaccattttcctatataatcactagcgtagtagcgttgcccacacaaacaacatactttatcacccgcgaatctagctagcttttacaactccaacaacataaagtagccttctgcttcagattatcaaatatgaaggtgatatcacttgcaatgattaataaatagttaaattacaaggtatgatatttatttgaataactcgatctatgtatatatttaaattaatactgccatgcatgaagcagaaaatagttataaaggtgcacatggagagtgacaaatgcagaagcaaggctctcaaaattgccgctgtatgtcaaggtgcatatgtcatgttcaataatttccattcgatcatccgttgctaactttataagatccattttaaatttgattgatataaccccgacaagtctaaatacatagctagtacctagtgtataaatcttgattcatatttcatagagtaagtatatatgcagccattttatgtgaacaacgttgtgcttcttctttgtcatggccacatatacaacaaattaaaaccttgccgacaaaatttgtcaatattgacaatttttgttactaaaattttagcgacaaattttttaaaattacatataaattattttgtcactattgttaaatttattttatatatatatatatatatatatatatatatatatatatcaaacattcaggtgttcgatcattagcattagaaggcgaaaccagtgatcaattggtggtaactggagtaggaatcgatgctgttttcttaaccaaccagatgagaaagaaattctgttatgcaacgttattaagtgtggaagatgtgaaagaagaagaagaagatgaaggtggccaagatggaggagaagaggaagatgaaaccacgacagaggaaaactatcctccaccttgtcccatatgtggcacctatcattctcctatgtaccatcacgtagcatatgatccataccctaatagctgctccatcctctgagttaattaattacctctcctggttttcttcttgtgattgtatggaaaaggcttttgacctttccatcaaaaggataggaaaaaaccatatattaaaaagcgttatgctttgcttaggaggatatggaataatgataaggttcaaaagtttctttagatttggaagtgcatgtatgtaaaaagatattttgttatgtgactgaagctagctagtttcatttgctagaaaatctattaacctaaatttcaaagtatatatatttaacatgggagtttatgaagactgagtaaattcacgatttaggttttctgccaaaattttatgtacaatatacatatacacaaacccttttaataggctatggtgatcacaaattgatgcatccaacatctatcaattggatttttccccattaagaatacaacttttttattccatcgatcttaagcggaaaactctactcttgaaattagtcttccagcaaccagccaatttcttttaattttaagtaattaccataattgtcttaaaaatattgacgttgttttcgggccttcaacgctaagactaaacattagtcctccctcgaagctatttttaaatcatgttgagaatggtcaagtacgaaaatattcagcagcgttatttgatacgaaaatattgtatgaaaatatgagtttttgttagtttgactaattaatttaacaagattttatgttaacttcattaggtgtatgagcactcaattttgtctaatatgtaaaaaattgaatatatatatatatatatatatatatatatatatatatataattattgtatgatgttggatatataatatagttaaattcagtttgaattaaactaatttgtaacataagaatcgaatcaatgaagtttagtttaattgattgattaaatgaatttttacaaatttcatagtatttatcatttaatttctgtcaagaatcaaacttgttattattcaaataattcaaccctaaatttaatatattaattacttatactaatcacttgattatattaaatatatttgaatagttggtaaacacctccaatagcatcgtattccaccttctcacagcaaaatcaagaaaagcaagtcatcgtttgtcattataatgtcctagacagcaatcttcttccgtcaaagaaaattcttaaggaaaaattaaacaacccttcatttgtctgtgtcctgtatcgatcgatcttaatgttcttccttcctactttcatagaaatttcctcaatttcttagaactctggccaatacaaataatatcacaaacttgtgtgcttatgacacaagtgaaaaaatacaaataattatcagacgaaaatcataagtatttatagtttaaaaatactaaaaagtaatattatttttaaaatgttggtaaaaaaaatctatttttaaaaaagaaaacttttactcagccgccgtttctgaccagcccgtagctagacgttgagtggatttgcgaacgatacctacatagaccaataaaactaattttaacattgccatgccaaaaaaaaaaaaaaaaatcaaagagaaagatgtaaatgtttatttttttatgtatgaaataaaggtctcaaaacagttcaattaattaactatttccaaaatgcatggaccaattgccctctttacactgaggtatctcaattaatagtgatgtgtgtggctatgtgtggagcttaaggcctgagattgtgatgcgctgatgtgtgttttttttatggattataagtatgttttatcgtaaataatcttatttaagttagataaaattattataaataataatattttcaataaaagtgtctaggacttatttgtgctagagaaaatatttttttaaactgatatatttcatgatcataaatattattaattaaataataaaatactggcaattagtgtaagaatagcttctaaaaagataatttgatgtagagtaatctagtctattcaaaaaatcaaaatatatattacaagttattcctccaacacgggtcactccccctccaatatattttccactcaaaatttggaagacatgtttctgtccaacacatgtttttggaagacgtttacttccgttgacaagaatagactaaggtagaagactttcaataattatttctaatatatcacatacaattataatatttattataatattctgcttacagaaatgttatttaatataatatactttacaagatatattattatgatattataaattatatatatatatatatataatattcataatttattatattatcataacattatattatttaatattttaataaatatttttgtgtgtaaaaattatatatttttattttgaaatctcatgagtaaattatttattatatatatgtatattcattcaatcagattcttccactcactttccccctcttccttcctatccccctttctttctacccaatcaaactgagggtaaggattttaatttttaattttttttcaaaattttcaataaacacttataagacaaaaaatgaaaaataaaacaaacttatattttaaactaaaattaatttatatacaagttaaaaatcaacttttaaaaaagataatataaaaaaatttctacaaactaatttatggatacataagctaattttaatttataattttatttcattctttttcttattttattctcttctctatgagatttaaatttagaccggtctattacgttctccccccctccttggttgttttacaatatcacattaaaggttgaaattttacaggattttgacttaacttggttgaagaggatctaaattccctttttttcccttaaaagttgcttcacccaatatgtattagaaggctactttttcattttctttaataaaattaaactacttaattttaaaagtttttccaaaaaatgtttgacaaacttctttctaaaaaaaataaagcatatataattaaaattaagttgaaacaaatctagccacaatagattaaaaaactatgtatttattgttgaaaaattatttctaaatttgaattcatgactaacaagtcattaaaagttatgcataaataagagttcacatttgatttgaatatactcttaagaaaatcaaatcgaatttaaaatagaacttcaaacacgaggccaagtctttcaaagagagtccacgttcttcgtaatttttttaccttcaaacacggggccaagtctctccagtcatttggttctttacctttaaatactctcttcactttccaacaaaacacaatattttatcgttaaacgtcacccaatttcccatcacaagtgtaaaatggaaaaaggactcaaactgaaaaatagagaaatcaatcagtttccatggcgtcctgcgcaatatgtctactctaagtcagcaaaaataatgcagaaaaaatattgataagagtttaattttccatcgtgcgagtattatcaattaataaaaaattatattaaatatgacttttcaaataattattataaaacaaaattatcatatattaacaaaatataattgaataataatgtaaattttttatattatcagtgtatttaaattaagttgtactttaatatgtatttttatgactttttatgattttgttgtcgtagagaatttacaggaaacctgtcaaataaggtgggttctgttctctagttctagaagatcccattacttataaaatgaaatttaatagttttaagcaaattataaaaagtacgatagaaaagtattactaattaatatttttatgcaaaaatcactgttacatgcggatgtataaacggtctcctaattgcaccactaccacgaaaaaccagaacatcactagctaaagcttctccccaaacataaagctaaagctgtcctctgttttaaattaccaaacatgaaggtgagaccacttgcatttgttagtaattaaattattgcatagattcaatttgattcaataataaactcttcacttctgcagaaaatagctatccaggtgcacatggagaatgacaaatggcactgaaaatggctgcagcctctcaagttacaattatccgtttattattgagaaatgttacttatacaataatttatacaattgacagaaaaaattgattttaagatgaataatgtgatggacaaagacataaaaatgactttctacaaatttttgtatgagcatcatgttagttataattctgtttcttttgaagtaccttttaagtccttgagttagttgtatataaacgtagcctttgcatcaatgaatatacagaagttctattcttactattttctctctatctcttatgtgtgaattttcttaaagaaacagtgaatgtgtgagtgtgtttaaaggaaaacaccaagtgcaacagagcaatatcagtttaacagtggtatcttgagcttaggttcgatcaagaagggatcttgctactgtaatcatggcgtccaatggtcatttttcggcaaatcttcctattctcacagggaagaactatagcagatggcatgttcagatgaaagctgtgtttggcttccaagagttgttggagatagttgaaaaaggcattgaagaagaaacccctgatgcaaagacgggaaacaaggatttaaagaagaaagattgcaaagccttggtaattcttcatcaatgtgtggatgattctcactttgagaaaatcgcaggagcaagttctgcaaaacaagcttgggacatactgaacaaaacatatgctggatcagaaaaggtcaagaaggtacgattgcaaacacttcgaaggcaatttgagatgctgcaaatggaggagaatgaaaggataggagactacctcaacagaatgcaggttcttgcaaattccatgaaaagttgtggtgagaaaatcactgatttgatgctagttgaaaaaatcctcagaaccttgattccaaaattcgatcacatagtggttgcaattgaagaatcaaaggatcttgagaccatgtcagtagatgaattgcaaagttctcttgaagtccatgaacaaagacttcaagaaagggttgctgacaaaacttctgaacaagcttttcaagttcagaacaattcaagaaatggttcaacagatagcaatagaggcaagagaggtagaggaaaattcaagttttcaagaggaagaggtggaaactactcgaaagaagggtgtaaatctcaatctgatcaaaagaatggtggttcaactaaaaatagaggaggtttctctggatcaaaaggtagaggaggcaagaaaatctgggacaagaagaacattgactgttactgctgtggtaagaagggacattactcaactgagtgttggtatagagaaaaggaccaagatgatgaggctcagcttgcagcagagggagactcagatactgaaccagttttgctgatggttacaacaaaatccagtggagagaatgatgatcactggtaccttgacacagggtgttctactcatatgacaggacacaaagactggtttatcagtcttgatgaatcaatgaagaacaaagtgaggtttgctgatggaagtactctatccactggagaagttggcagtgtgatgattaaaataagggatggcaaagaatcctgcatagaagaagtgctctatgttcctggtttactaagtcttggtcagcttgcacaaaagggctaccaaatgactatgttagacaaaaggatgaaagtttatgacaaacagaaaagactaatattgaagcctcctctatccagaaacaggactttcaaagtaggcatcaatgtgctggaaagcaactgcttactcacaaccacaagcaaaactgaatggttatggcattacagacttggtcacctgaatttcaaggatataagtcatatgcatgagatggtgagaggaattcctcaactgaaatcaactactgaaaaatgcaaggattgcttagaaggcaagcaaacaagaagacctttcaaaagctttgttcctgtaaagtcaaagcagaaattggagattatctactctgatgtgtgtgggccaatacaaacagaatcacttggtggaagtaggtatttcataacctttgttgatgatttgagtagaaaaacatggatttacatgattaaaagaaaaaaatgaagtgtttagtattttcaagaagtataaggctgttgttgaaaaacaatgtggaaatcatattaaaaccttgagagctgatggaggtggagaatacacctcaagggaatttgctgagttttgtgaagaagcaggtataacacatgagttcacacctccctacactcctcagcataatggtgctgctgagagaagaaacaaaaccataatgaatatgatcaggtgcatgctgaaattcaaaaatctgccacacacactataaagtgaagctgcctctacagcagtttatatacttaacaggtgccctaccagcaggttgaagagtaaaacaccagaagaagcttggtctaacaccaaacctgacataaaccatctcagaatttttggttctccgtgctatagacatgtacctgatcaactcaggcagaaattggatgacaggttgagtagatggtttttcttggatatcgctccactggaggctacatgctttatgatccaagaaacaatcaagttgttataagcatggatgttgtttttgatgaattaaaagattatgaatggagagaagattcagcaaacaaaactgttaaaattcaaatcactgctggtacctccagtgatatgagtagtgaagaggatgctgctgagatccctacagatggaagtgatactagaaaatctcagagaatcaagcaaactccatagatattgaaagactttgaaatatactatgaccagcaaataactgaagaaggtgagcttgtgcatcttgcactgtatactggaactgaacctgtcagttgtgaagaagcctttctaaatactaaatgggttactacaatggaggaagaattaaattccattgagaagaatggaacctgggagcttgtgacattgcctaaggagaagaggccaattgctgtaaaatgggtgtacaaacttaaaaggaatccaagtggtgaagtgatcaagcacaaagctagacttgtggctaaagggttcttgcagaaagagggtattgactatggagagatctttgctcctgttgcaaggattgaaatagtaagggttgtagctgccattgcctgtttgaaaggctggtccatgtaccaacttgatgtaaaatcagctttcttaaatggacctcttgaagaagaagtctatgttgatcaaccaccaggattcaaggttactggtcatgaatctaaggttttcaaattgaggaaggccttgtatagattgaaacaagctccttgagcttggaatatgaagattgacagtgttttgattgggattggttttgtcaagtgcccctcagaacatggaatttatgtgaagcacaattctgcagatgagctaacaattttttgcctctatgctgatgacttactcttgactggaagtaaggcaaaagagatagaagttgtgaagaaattgctaatgcatgagttcgaaatgacagacttgggatctttgtcatactttcttggcatagagttcaagaaaactgaatctggtatcattatgcatcaatcaaagtatgctggagatattctgaagaagttcaagatggaagaatgtaatgcagcagccactccaacagaagcaggattggctttgagtctgaaagatgtgggagaattggttgatgctacagtttttaggcaaatggttggctcattaagatacttgtgcaatacaagacctgatttggcttacagtgttgggattattagcagattcatgaaggctcctaagacacctcatttgatggctgctaaaagaatactaagatacataaaaggcacaattcatcttggagttttgtttccttttggccaaggcaactctgaaactgagttagtaggttatactgactcaaattggaggggagacaatgatgacagaaagagtacaactgcatatcttttcaagtatggagaggcaccaatctcttggtgctcaaggaaggaggatcctgtagctctatcaacttgtgaagctgagtatatagcagcttctatgggagcttgtcaaggaatgtggttgagaaaattgctaaaggaaatgaagatactaaagaggagacctgtaacactgcaaattgacaacaaatctgcaataaatttggctaagaatcctgttgatcatgggaatagcaaacatatagaaaccatatatcattttatcagagacaaagtgagcaaaggcaagatcaaattgacgtactgcagatcagaagataatcttgcagatttgatgactaagcctcttagaaaggttaaatttgaagaactcagagacaagctgatgtgcaaagctgaatagaaatcagaattatggggggatgttagttataattctgtttcttttgaagtaccttttaagtccctgagttagttatatataaacgtagcctttgcatcaatgaatatatagaagttctattcttactcttttctctctatctcttatgtgtgaattctcttaaagaaacagtgaatgtgtgagtgtgtttaaaggaaaacaccaagtgcagcagagcaatatcggtttaacacatcatatttcttagtgcatgtttagattaaagtttgcaatattaagtttaagtgagacttaagtttgcaaactgattttacaaaaactgaattttcagacaatgtgtaatcatattttttgagggtaactaaacatatcaccaaaatgaaattacttttcaaattgaatatggaggagatgaagaacaagaagaagcagaaacagaaacagaagaagtcacgccaaagcaacctcattatgataattaccatattccgaattgtccaatatataccaatagtatgttccaccttctccaacgtgtaccacctatctttagggatggcaaaacgggcctggccagacgggccggcccgtttagcccacaaaaaaatgtgggttgggttgagattttgagcccacattcattaaacgggccgggccaacctggcccacaaaaatgtgggccaaatgtgggccaggggtgggccagcccaccgggccagtagcccaccaataaaaaaataaaaaaaatatttaataggtaattaaatgagtggtttagaggaagagtgactaagaagaagtgagtgattttgaatccttaagcctaatatatttttatttggaacctaataataagttatactacatgtacaaatatgttttgattgcctacatcattgtgaagcaaatttctaagaatttgttaagacttaggagctaattgaaaatcattgttagataagtattccctgattatttttgcttctattaggcatgtattttatattaaaaattattgttatatgattaagttagtacattattaatttttagtataaataattacatttaaatttttttaataatttttttgtcttttttctaaaaaaatatattttattttatttttaagtgggttgtcccgctggcccactaacccactttaaagtaggatgggttagcattttcagcccattttgtaaaagtggatcagtccggcccgacccacttttttagtgggttgggccagcccggcccattttttggtgggctggcccactttgccatccctacctatcttccaccttgtccaatatgtgccactgccacatattttccaccttctgctcccatgtatcgtcccacagtttatgattcataccccaatagctgcatcatcctttgactctattgaaaaagcttttgacatatttccatatcagaaggattccataaaaccatttaggttggatatgctgctgagatagtgttgttggacttgataaaatttagattttggtactagttaacaggaaaagttaagggtttttttttctttttcttttttaaacagtctatatatatagatcctttgttatgaatgaaagctctgtaagaattgttacacttttataggggttgaggtactcttgtacctcatcataaatatattttatctttgctgatgaaaaatcattcacgaatcaaaagcgttacactaggctaattaggatatggttcaaatttctttagatttggaagtgtatatgtaaaataacacatttgtaatgtgactactgaagctagtttatttgctagagaatctagtaatctataaatttcaaaaactatatatagagagagaacaaggaagtctgtttatgaagactgcagagtaaaggtttgattttctgtcagagaatgtataatgcatacaaacaaacccttcaatatattgaggcggtcacaactaaatgcattcaacatctatcaattaattgatattttttcccgttaaaaatacaactgttattattttccattaactatactcattttttgggtgtcttgaaaactctattcttgaaattattagttagtctttccggaaataaagaaattattaccattatatatatatatatatatatatatatatattgaggttgttttcaggtcttcaagccttaccctaagactaattaaacaccagtccctccccccaaagcaaccttaatttaaatcatgtttagaatggttaaattgttagaattaattacgcttggtagctgtcacacacaatgaaaaaaacgcgtttccatgtgcacatcctactcttatgaaacttgaagtataatatgcttatttagtagtattatatatgtagtttaatgtcttggttgcaaattattatccttattagggattacgtgtaatcacagcggatacattttttgtagtcactaccgtttagttagtaaattaaactcggcatgtaaacaaccaataacaacacttcttgtctgagatagtatctttattcaataatatttttctttaaaaaaatggtacgaaaatattcttgtacttagaaaatagaactttcggcaatatcagaatatgattatggacggaaaataaatacatttcattcacattgtatagtacttatgacgcaaatgaaaagataaaaattattatcaaatgaaaagcataagtatttataattaaaaaatatttcttatttttttaaatggtaataaatatagttttacatgagtttcaagaaatacgttaatgattttatttgtataaaaaaaatactcaactaccgtaactgaacaacccgtagctagaccaataaaattaattttaacattgctatcctgcaaaaaaaannnnnnnnnnnnnnnnnnnnnnnnnnnnnnnnnnnnnnnnnnnnnnnnnnnnnnnnnnnnnnnnnnnnnnnnnnnnnnnnnnnnnnnnnnnnnnnnnnnnnnnnnnnnnnnnnnnnnnnnnnnnnnnnnnnnnnnnnnnnnnnnnnnnnnnnnnnnnnnnnnnnnnnnnnnnnnnnnnnnnnnnnnnnnnnnnnnnnnnnnnnnnnnnnnnnnnnnnnnnnnnnnnnnnnnnnnnnnnnnnnnnnnnnnnnnnnnnnnnnnnnnnnnnnnnnnnnnnnnnnnnnnnnnnnnnnnnnnnnnnnnnnnnnnnnnnnnnnnnnnnnnnnnnnnnnnnnnnnnnnnnnnnnnnnnnnnnnnnnnnnnnnnnnnnnnnnnnnnnnnnnnnnnnnnnnnnnnnnnnnnnnnnnnnnnnnnnnnnnnnnnnnnnnnnnnnnnnnnnnnnnnnnnnnnnnnnnnnnnnnnnnnnnnnnnnnnnnnnnnnnnnnnnnnnnnnnnnnnnnnnnnnnnnnnnnnnnnnnnnnnnnnnnnnnnnnnnnnnnnnnnnnnnnnnnnnnnnnnnnnnnnnnnnnnnnnnnnnnnnnnnnnnnnnnnnnnnnnnnnnnnnnnnnnnnnnnnnnnnnnnnnnnnnnnnnnnnnnnnnnnnnnnnnnnnnnnnnnnnnnnnnnnnnnnnnnnnnnnnnnnnaaaaaaaactaatcaaagacaaagatgtaaatgtttcagaacagttcaattaattaattatttaaaaaacgacgtttaccaattgctttgctctttttcccctcaggtatcccattccttttgtagtcatgacctcgacaaccacttgacttactacaacctagctagtggtacgcacacatgtgtttgttagagagaaagagagttttaattctgagatagtacgtatttcatatatataattctgagatagtattaatactgtactcgatatatcgatcgttattgatgttaatttatgcatcattaaaataacacttaaatataaatatattataattttttacatatgaaatctatcgatataattcatgacaatgatatatttagaagttgatgtagatattaattgtgcatatagatatctgttgtttgtttttagtttgcaattataacaatataatagtgaattataaaaaaaattatatggacaaaataatcatgtttattgttaccaaaattataattaacattactgattcacaagtcatttcataataacaatcgaaaagctagccataataaagaaaataggaagtatttggaatatatagaatcaaataatgtttccagttcaatagacatattctaataaaagtgtatgctatttcaagcaatcaaacacaactaaataggtcaattatataattacaaatatttttttagacaaaataacattattatctagttaccaaaaggtaataatacttaagggtgtgcattaaaagagaaatttccagagactcttttgaaaattaagagtgaagaattaaacagaaaaactatgaatttgtaattgtgaacccaaaatatttttcggacttttatatattttatacaacttttagttttgtattattttttccttttagtagtaaaatataacaaattgggttttgacctatcaaacaaatccaaaattgataaatcaaagctgccatttacttcctgaacctccttttctttgcttctgcaccccctaaagaacaaaaatatctatcatcttcttcacctacacccgatgtcggagaagctatgttacgcctgctttgcaaccgcgtctgagggctacggcagcaaaatgctcaacgacttcaagaatcgcctagtcttagagctcaacaacagcaaaccagtcatattaattcaaaggttggaaagttgacaaaaatgtaaaatgcgacagcattctgtaaatccttttccaaaatagtgaattttttttaacattccaaaagggtgtttccagaattgggattttaccattatggaaagggctttccaaccttatggtttcttatactttaatatagataaatttggtcccttaaaaaacatttgaattttttttattgataagaatcaaaaataaatatcagaaaaattacaacaattcatacactttatattcaaccaattaaattaaacctccattaataaaaatatttgaatttaatcacacaaatgattccttctcccatgcaaagaatgtttccacacatatgttcgtgctctccaacgaaagtatatatatttttgggcaccctctcctacttcctaatttcattatgcttatttgtgttttattcctaactttggacaatatagtattatatacttaatgatttttattttattttatttggggggttaggaacgaattaatggccgaagaacatgatcaagttgaaaatagtatgaaagtcaactcaaggtgaagaaagtgctccatattaacttcatacaactactgccatgtaatatcaactcgacgctttttgcatgaacaatttcagtcacaaattttaaaagaattaatgaaatttacatgaagttgctgcaccttgaaaaaattaatggctgaagaacatgatcaagttgaaaatattacggaagtcaactcaaactgaagaaagtgctccattatacaactactggctactgtatgtataatcaactcaacgcttcatgagcaacagtttaagtcacaatttttttcttttttagaagcgtttctgtcacaaattttaaaagaaaatttacatgaagctgttgcaccttgaaaaaattatatttagtcgcatatttgtatacttttttgtattttttttatttttaacaattattaacaaagcaataacaacttgtacaaaaaggatatgaaaagtcaaagacagggacagatagctagcccaggagagaaaaaatggcattctctccaataattttcacgtgaattttagtatattggatgaagcacttctaatattaatcaagtattgtacgagagtttattatatacatcatgtacgtccttgacgacgctgctagctagggctaaaagccaccaaccccaaaagggaaaacagctacaaagtccacgctcttaattagtgggttgcacatgctcatcaccacttttatatttcgcaattaaatatttaaataatagaaactattaattctaaaccatcccttcgaaaatggattggtgcagcatattgcatggtcgcttatgtgttgcccacatgcatgtgttcagaaataatcattaagatatgtatcaacagaatgaattatttaccacttgtaagttgtattgtttaaccaacgggtcaccaatgccatgccaaagaacagttgcagatagagtatgtgctaactaggtattatataacccttctactggtagaaaatttgggtttcattcctttttaggcgcgcgcagacacaattattagcaaagaaaaaggcctcaatggataatgtattttctctaattgaataatgagagtaagacatgggataagaaattaaaggaacaagttttttctaatataattaaatgttataactaattataatgggtcgttactctttacatattaaacagtttgtatcctttactgtgtcgtgaaattaatacatatattgatcattaaaatttataaaaaaaaataataataactaaagcttaaaagattatagagagaattactttttttttttcttctgaaaaaatgcatatttatcattatatatatatatatatataatttaagatgtaatatgttatatctgttagggaagaaaaatatgaattttaacacaagaagggatgaatgtataacacttacagttgtcacacggaataaaagtgtaaagaatattttgataatattttttttaatggaattttaatgaatttttttaaaaaaaataaagtgtcatacactctaatctatcagggaagctaggaagtgtaaattttaacacaagagaaaaggacaatgtactatttatatctttaagaaaggagagtgtaacttacacatgactagttaaatatgagtttaaagttttttttttatgaatttatataaaattctcaatagttgatattctcttttatgacctctctcatatatcgattgatattctctattattgttaatataatttttaatataattattataaaaattaataaaaacatatatcacgataagttgtaattgaatactataatatgtaaaatacattttcaatgcaaagcttatcttcttgtaattcaaatgctttttaaagcaaaaaattcgttattgaactcaattaattatttgatcactgccttcttcctctacacttcttcaaattaaattcttacttatcaatctttcccaaaagtttaataaaagaaacaaatcctttatttttggtggagcgagagatattgggaaagcagggttttcgtttaattgagcaaaccctgattctccaattaccatgcaaatctgatgatcagcagaggcggatgcatgtgtatgattgcccccccttaaattttgggatcaagttataatatccctgttggaatggtggaacagcggtgaaattggatagtgcccctccttaaatttttgttgaagagaaagagaaaatagcttataaaaacagaaatggaaaatagaaagaaagtgccgcacacagcaaccaagaagaagaacaggagaagctaactttgtcttatttgagtctaatttgctttctgtacccactttttttttttgcagtttcatattacatttttgaaatgagcttttgagttttaatttatgtagttgctatttatagtcttttttattattaatatactttacttgtattatcaaatttaattgttattttggattttttaatatagaattatggatgaatttttttaatcaaataattttagttatatacatatatataatataattttaagcggattcataaccttgtacataaaatattgatttaaattttctttacaaaaaaaattttcgggggcgctgcccccgaacccccaccattaaatctacgaacataaaattattttttacaacgttaaaatgcccccccttaatttattttctggatccgcctctgatgatcagggtactatttaatttcccgggattttcactaaagacagtcgtcatgacattttttttttccatttaatattccctattcaattcactctatcaaacatatacacgaggtcctataagctttccatcaacttcctcataaaggcaccccgcatgaaagaaaaataattgactagtgaattaggagttatcacttattagcatgcatgtcacatattgcacctttgccatttcatgagctcatccaaaataaagaaacacatcaaatctgtaaaagcgcactacaaacttgatagtgaagaatccttggaaactttttctaggcttcccaacctgtccccaaagctactggcatcaaactaaagtggtaaaaaaaatttaaaaaatacataaatatgtttgagatcttgataaacattcaatttttattttgagtctctagtaattttttcattatatttctgatgtattaaatatttgttttgagttcttaaataattacttgacttcatctttataacttattaatcattcagatgatatcacgtcttacaataatgactcaaaataaaaaaatttaatatattaagaatacaacaaaaatatttattaaagacaaaaaacaaaaattaataatttattaataacctaaaatatatttaaaccaaaataaaattaaaaaagtcaccttaaggacagaggaagcagtaaccacagaaaggaataatagacataaccccagtaacaagtaagctttatgaaagcttatcatctgcaagccatgtgccaaaagtatatacaaaagcaataaaaaaagcatgcactcaagtccatccccttttttatctttcttttacttttgcacagcttctattgttttctgatttagagggttcccttacagctctgcacacagatcatcatgatcaagcttatttctagctaacatgtggtctctccctatatataaaagttagcagtttcgtgtaacgtttaaaataacaccaattccactttatttatttttatatttaatgtctaatattgttgatcaagtaagaatgtgtcactttccttattatactttatccaatcctaataataatgtagcttactactccacctatgtgcattggcatatattaatatggttgaggacatctcgtggggaatttgtgaaggctttcacttgtgaacttagaaatctgaagatgggtttcactgaggagttggtaagaagtgtcttctccaaaagtcgttctgatgggtctcatgaaaacaaagtgagtctctaatatgctgcacttattctatattatctacaaatttacaatagaaaaagcataaatgcacaaaacaactctcttagctcaatttaagttccaataatgttctcattgaagattgcattaaccagcttaatttgaattatggcctgctaattaacaggtgaggcgcaatagtgctgaaaatagaagatggttatctgtgaggtcatacttgtgtggtgatgaattcaattcagtccttgcagagaatgattcagcttcagttaagagctctgaagtcacggtttcacagtccgtacaggaggacttgttgaacgataaaggagacactgagagtgaagaaactgtggagaatgtagcccagaacaggccaagttcaaactccaaaaaatcattgagtgaggaagaagcagctgttcttattcaatcaacatttagaggcttcctggttagctcatcaaactttaattacatcaattttcttattcatatgaaaaattatatcttagtctaagaaaatattgtattcaagttaaggaaatagtgaaaaacatattcatgcgcttaccttaattgttgttggtactaagttcaaggagtgtatgagatgagtgaaaattgcaacactgaacagagaattgagtgtcaattttcacccttcccatttgttaatttctcccatttccgttactcaacccttttaaaaaatttaatgaaaaaaatgtcaatggttactttttagaatcttagcatataatggtatgttcaatattcatatgattcatagtttgttcattaatcatagcatatctggcttattagcatcactaatatgctgcacattacagttgaggcgtcaaaatggagaaatcaaatcacaaactggaaaagatgagttcaatttagtaacagaaagtccagacagaaagtccatgggcacatcaattgaagtccaaaccgcaaactctacggaagttttctctgttgaaggagaaaaaaagggcatttgccaccgtattcagcgcaggaccagaactcaagcaataaagcaaaaggtacaacagaagacaatgatgcattgtgaactagcactccatgattttggttaaaagagaaaaaattaaaattgagatatgctcaagagaataataaattcagaagaaaaggacaaaaaaattagacagaagtaccattatttaagacatcttccagaacatattttaaacttcagatgattaactaaaagagtggttaatattttatcaaagttttcttttaaaaaatgaaaaacaagaaccagaagagtgataagaagggtgtaaagaagatggacatgttaacttgataaatcatctttttaggttaatttgttccacattataaatgtgtctagggtctaggccaactaagtcactagctcaattggtacctccccaacactttgaatgtgatattgatgttgaaatttaatcttccacttggccacttttttcctttttattgtttgcattctccaatataaccaaaagtcaaatatatcaggatacaccttaattggtaattctcacttctcagcaaggtatttctatttcgtacaaccagtttctggcacacatggttttttcttgtttttaatataaagtcacaaaccaacgcaagcaacgttcgttagttttatacatagcacacattgtaggatttaagagtctgaactttaactgggacccattaaattggctataatttacaagttacaaccaatcaaaattctgttaagctgcatagtaacattgacattttcaggaagattgggatgacagcacagtaagtagctatgtttcaaaaatgaggatgcagaatagaatggaggcttcaacaaggagggaaagagcactggcttatgctttctcacaacaggtaaacactaaagagtaaacattatatgcacggatagagtgacagtataaacaaattttacactattatccaaatgcaaacaatcatgtacggtaagttttatgacttacaataattaacttaaaatttataataacaatgattctgattagttgataatgtaaaattctttacaccgatagtacatagaaatttaatgaagataaaggcacaggactggtaacaaaacactaatcctgattgttgcagctaagaatctgttcaaagaggaaatctccaaaatttaatagcatggagtcaaatatgagttggagttggcttgagcggtggatggcaacgcgccttccggagacatcatcagttgaaagccatgccatgaagcagtatgacccttctaatggtagtcacaaattcacaatcatgacaagatttttagatgctgctggggaagaaaaggagagctgcgggtcaaatgaagtgccccttcattttgataactattccatcaattcccgagaagaaaaagttagcttcaaaccacatacaccaaagaccaacttcaaagctaggagaactgtttcaaggcggaaaacagtgcctagttatcaattccatgaagagcagccaaaggtcagaatctctttactagttcacatgccatccaagtcaagcctaacaaattcatgattatgtctcaatgattttttacacgagtacactatcattttagtctccgttgttacattaatctctaaaattaaaaaaattaaaaataagttcttggaattacaatctgtcaatcacattagtctataattcaaaaaaatgtgactaaaataatgatactaacatatgttcaaaaaaatgtgactaaagtaaggatactaacatatgttcactcaggcaccaaaataaagataagtagttaagtttagaaacttaagtgaaacaactaataaattcatgaacttatttgaaatttctttaattttaaggattaatgtgacaggtttttacatttttagggactgaaaatatgattctctttttttaatatataatgtcatgatcacgaaagatatgtttagaatgcatgagcatgttgcttgtgtatctctaccatcttctaaatatagatttttaatgttcccacaggtaagcaaaagagatggttcaggcaatgctagcaaggatattaagcaaaaacaaaagcaagtgggaagcaggacagaaattacattaagcacctcgaaagcttctaatgtgtaacttataaaaaataaagtcaaagtatgtgtctagtattgagatgtaatggtttgattctctagtagattcttgattccataaatcttatgtgtacattgtacataatatcaagtgcaagattgagatggttgttctgatgatttgctttccaaaaattcattcattattaaatagaaaatgaatacaatcacaattagttgcatgatgggacactaatttttttaactgatcgagaaatgataatgctcaatgttaaaattcaacttcgtatattatttcatacaaaaccaatgtgtgttggtttaatagaaagagtttgaatatgtaatataaaacttaataatctaatcatgcttatacacaaattaacataagcaattagattaagtgcggaaaaattaagatcataaatacctcccgccattgctcacggtttttgagtctttggattgcactgaagatgtctcttgagtcttctaaactctgattctaaagcactagatggtgtatatgctgatgtatatagaatgagttcagggacccaagaaggctgtagacacacttatttatagaccccttgccatcaaatggtcagttacggtgtgctaaaagaagagacgttaatgttgcaaaaaaataggggatgtgggtaatggttagtttcctgaattattgttgaccactatcaggttggttacagatattttgtaatttcaaaataacaaccaacattctcccacttggtcgacatgtcccttaatttacatacaagaaataaaatgtatgaatcatggcgataagtcctcttaataatgagcgagtagtatcttctatgtattacattgcattatatttctcaagcccatacaacttaatgaataaacccaatgtttattctaggtccaaacttaattgatgtttctcagaataaataactgtagatgcgcataaactgaatgaaaaacatcacaatagagtttcttaatatcattattacaatgaaaatcatatatgagaaccaagtttcatcctttccacatgatccttaaatttgaatggtggcatgccctaaaggatcgacaatcattaattcagtgctaatgttcttaataaccactgtattatctttagcacattctcttatggctagatacttaatgtcgatgtctttgcttcgactacaaattttgttattcttagccatataaacagcatctgaattatcacagtatatcttcatgacttagaaatagaatccataactctaagtccagaaatgaaactccttatccatacaccatgtaaggtagcctcaaaacaagaaacgaactaaacctctatagtggaagtagcagtcaattaaggtctgcctgatacttctccaagacacagctccgatggctagcatgaaaatatatcccgaagttattaacttcaacgcagccaatgtagtctgaatctgagtagtcaatcacttccaaattgtcagtccgtctgtgcataagcatataatccttagtttcccaaaggtatcttatcactttctttgcaactttccagtggtctaaacctgggttactttgatatttccttaacactccaaccacaaaagcaatatcaggtcttgtgtagacctgagcatacataaggttttcaacagttgaagcataagaaatgttcttcatttgttcccgctcaagattatttttcgggcattggcttaaattaaacctgtcacccttcataatgggagctatacttgttgaacaatcactcattctaaatctttccaaaactttgtcaatataggtctcttgagacaaaccaagaacacctcttactttgtctcttgatgccaataacgtaagaggcatcacccatatcctttatatcaaagttcttagagaaattgtttaacctcatatagtaaacccttgtcattggttgcaaataaaatatcatctacatataaaataaggaaacaatttttgctcccactaatcttatggtatatacaatgattcatgacattttctacaaaaccaaatgaagaaataatgtcatgaaattttaagtaccactgacaggaggcttgtttcatatatagatttcttaagcttgcataccaattgctcatcctcaatagaggagaatccttcatgttgtttcatataaacctcttcctctatgtctctattgagaaaacttgttttcacattcatttgttgcaactctaagtcaaaatgtgcaacttgtgccagaatgatgcgaagagaattttacttagatacataagagaatgtctccttgtagttgattccttctttttgattaaatcccttggcaatgagtcttgctttatatctctcaatgttgcctaaatgagtatttcttagaaagactcatttacatccaatggcttttgcaccatcaagcaactgaacaagacctcagacttcattcgttgccatagaattcatctcatctttcatagcatcataccacaagtttgattctttagaactcatggcttgtgaaaacgtttcaggatcattttcagctccaatagtatagtcagattcctgtagatacacaacaaagtcactcggtatcgctgatttctttattctagtagatctccttaatgttgtttcattatcttcttgaggaacttgttgttcaattggttgatcaacaatttcttcttgctcctcatgaacaacttgatcaactagattatcagcaaattgtggatcttgaatgataggttgtgtaacatcccgggcactgacgagggcggggagtgatcgccggtgcagtgaggcacggacaaggagcggctcctggcaggcttccagtggaaggggtacatgaatgaatcgaatacacacccgaacgagagggatccagaggctgtgcaggtatgggactgtacagtttaggataacttaaaggatttaataggtactacctatactaacaaggtgcatctacttttcggtagcccgtaacataagaactccacagttaagcgtgcttgacttggagcaatcttgggatgggtgacctcctgggaagtttctcaggaagtgtgtgagtgaggacaaagcacactgaaaagtcttgtgttggtatgtagggacagtcgttgatcctgtaagtggtcgggcgttacattagtggtatcagagcaaggcctctctaccagtacggtgtggttcgaggacgaaccaggcggaagctggtgggcatgtaacatcccgggcactgacgagggcggggagtgatcgccggtgcagtgaggcacggacaaggagcggctcctggcaggcttccagtggaaggggtacatgaatgaatcgaatacacacccgaacgagagggatccagaggctgtgcaggtatgggactgtacagtttaggataacttaaaggatttaataggtactacctatactaacaaggtgcatctacttttcggtagcccgtaacataagaactccacagttaagcgtgcttgacttggagcaatcttgggatgggtgacctcctgggaagtttctcaggaagtgtgtgagtgaggacaaagcacactgaaaagtcttgtgttggtatgtagggacagtcgttgatcctgtaagtggtcgggcgttacaggttgcacaacacccggttgagctggaagggtattgttaataacaaccaatctaagatttaaagtggatggttgagtaactgaatgatctttctcagaaacaaaatttctggattgatcgctcccactaatcaagtcattttcaagaaattcaatatttcttgattccacaatccttgtactttgaaatggacaatacaaattgtatcccttagacctttcagcatattcaatgaagtgtccactaatggtccttgggccaagcttcttttcttgtgggttatatattttcacttcagatggacatcccaaacgcgtacatgtcgcaaactcgatttccaattcttaaattactcaaatggtgtctttgggacaaccttaattggaactcgattcaatatgtacactgtcatctttagtgcttcagtccacaatgacttaggaagcttggaaatactaagcaaactttgcaccatgtccattaaggtttggtttcttctttttgccacacctttctgatccgaagaaccagaaataatgtactgggcaacaatcccatgttcttgaagaaacttcacaaatagatcaggtgcttgtccattctccatgtatctaccatagtattcaccacctctatcagatttcacgaacttaatttgctttccacattgtttctccacttcggccttaaaaactttaaaggcatctaaatcttcatctttagaatgaagtaagtagagatacatatatcatgaataatcgtttatgaaggtgataaattatttcagactacttacgtccatgtctggacaaaaaatatctgtatgtatgatttctaatagatttgagctcctctttgcaccttcttaaacttgttagtttgcttacccttaatgcaatctatacaagtatcaaaatcagcaaaatccaaagcactaaataccccttcatttactaatatcttgattctctcgatagagatgtgtcctaatgttaggtgccacaacatagagaaatcctcattcataacacatcgattcatgccaacaataacatgcatagcatcataagtggtatcattttgcaaattaatatagaaaagaccatattgcaaatcaatccaccatgtgttatgattaatcatattagattcataacaaactaaataggtaggcatacatttcttttccaaaccatagtttgaacttaggacaatctttcttcatgtgcctcttccttttatagaagaaacacctggattatttcttaattccagcttgaggtagtattttaccacttcccttgttcttatggcctttcttattcccttgttccaactgcaacctcccctcttcctgaatacacatggtcatgagttcattaatagaccatttatctttatgtgttgtcaggtattttaaagggaccacatggtgctgggagagtattcagaataaaatgcactagaaaagagtcagacatgtccacctctagaatttttaattgagctgcaatgtccctcatatgcatgatgtgctcacgcacacccctcagagtattgagcttcatggaagaaatttcattattaaggtatttgtcaatgtctttcctgaagtttcaaattgttcatcaatttacttcaggagtcagttggatctttctaatactcatacagatccatctcctctgattcaccattctttataattgttgatagctcaactttaaagatagtataatcaatgttcatataccctaatgtcagcaaattccttccaaatagaaaatataatctcctctcaatttcgggacaacaattgtattaataggttgtatagttgcaaaataattcaacatatatgcttatcattaaaatttgagacaaaaataatgtatcatgatttatcaatgtaagtcatgcttataaaattatgaatttagcgatataaaatttgcctgtgggctaaaattttaattctattaaattcacataaacattatgataaaactatcaagttatatttcttgatccctgtgggcaaatcaaaaaatataatttaatatcttatcctaattaatcatacaaaaatataatagaaattcctgtgggataatatctactatattatattatgattaatcacaattaatattatttaccttatgtgatctagagactcttaatatataatttaaataattaaagttgctgtggctaggctttaatcaattaaattataaagatcactaaatattgtctaattttcaaaaattaattttactgtaatcaaccataaacaataaaattaaataatcaatcatttagattaatcaacttaatattacatgtatagagaaacataaattaatacatgtaataacagaataacaataggtcatgtgaacatacatcacaaaattgtcattagttcaattgacaaaatactttataaccatttatttggttatgggaaccccatctaatgcatttcattttattttgaattcttgaattgccaagtcatgatagcataaataacaacattagcataatgcctaatgctactcgtacccatatcacaaccgttacacaaatcaaaataaaataataaataaaataaaaatgggaatagtaacaataaattacaatataatgtctaattccttatatgatctttaaacaacttaatatataattttaattaaattatagatattgtgactaatccataattaattaaaattataaagatcacttagacataaaacttaattatatgagaataaattatattatacacctcaagatcaagatataatataatgataaataaaattctcatacataattgcataattgaaacataatattatgcatttgatttaatatagatgcatataataaactctaccataatatattcatgcataaacatataacatacaaataaaacaacaaaatatcaaatagtttcatgtggcttagtggttgatgtgagtatcatttaagtgaaactcatgggttcaaaccttttatttatttattactattcatcatcttcaaccttgagttgggtcagtttgacccaattgcaacccacggacccgaattaaaaaaccaattatttttcagcctttttcaacaccgaaatccatgttttaatttacataaactttagaaactcaatttccatatgattccaaagcttcttaataattaaaacattcaaataaaatactcatattttaataaaataatatttcacatatatgagtgttaaacaaagcaaggcagaggcaataaacgggctctgataccaaatgtaatataaaacttaataatctaatcatgcttatacacaaattaacataagcaattagattaagtgcggaaaaattaagatcataaatacctcccgccattgctcacggtttttgagtctttggattgcactgaagatgtctcttgagtcttctaaactctgattctaaagcactagatggtgtatatgctgatgtatatagaatgagttcagggacccaagaaggatgtagacacacttatttatagaccccttgccatcaaatggtcagttacggtgtgctaaaagaagagacgttaatgttgcaaaaaaataggggatgtgggtagtggttaatttcctgaattattgttgaccactatcaggttggttacagatattttgtaatttcaaaataacaaccaacatgaatatcttaagtaaatgattaggttaataacccatcctcgaatcaaaaatatcctcatcatttaccacacgagataaaagtaaaagcacatgattcacgtgtatgaaatcaggttgacgatgatatcataaacaaaaaataaaataaaaatggtgtcatacaaaaatctaagataatcctattatatcagcagttaaagctgttatttaatagtaggaattaaaactaaaaatattttaataactaaaacaaaatacaagacattttatatgaactaaattgtcatttaagcctataaaaataattctatctacgacaactaacgatttctttaatttagaaacatcatacattatattaactttatttttgaaaatcactccttctaaataatacaagaaccatgcgaaccagctttattcagtataacttagaccaacctaataatccctttttccaaccattcaatttctataatataaaacgttaaaaaataataatcataattcaaaatgatgaattgatgatcatatgtctataaaaaaataattaatgttaatggtcagtgaggatgtagacaagttgaacacaaatcaattttgtcttgtgtaacgcccgaccacttgcaggatcaacgattgtccctacataccaacacaagacttttcagtgtgttttgtcctcactcacacacttcctgagaaacttcccaggaggttacccatcccataattgctccaagtcaactgtacagtcccatacttgcacagtctctggatctctcttattcgggtgtgtattcgattcattcatgtacccctcccgctggtacctgccaggagtcgctccttgtccgtgcctcactgcaccggcgatcactccccgcgctcgtcagcgtccgggatgttatatcttgaactagaaaattataatgctttatgcttaagtttaacttattagaagaaaatgttaaacagcatgaatttgtgaaacagcacataaaaacaattactcttgaattcctcgtatacttatctcttctaattatgcttttcatttttatttctgaaataaattttaatatttaaaaaataaataattaaaaaatcttataacaaaaaataaattatttataaaaaaactaaaatacaatttacataatcaagaatatttttaatacaatttttaattataatataatttgtatattaaaaaatatttattataattttaattatataaattaaacatttatccttcccaagttacacttcttttttcccatttgctgttagtctatttaatttcaagtggtaagcattttccatagacatgttgtctaaagaaaatagctgtattttactatgattcatgaatggtttcttttggaatgagaatattagtacaaaagtactgttataaaaaaaatattataaatattcattgtacaaataaataattttttttagaagaataaatctattttttaaattagccggtgtttatttttctgttggataaactccaaatcaatttgggcactttggacttttcacgtccctcaccagtgtttctgagtcctgggaaagattttctcccttctacgtttttgcttcccctacgttcctgcagcagatgatcaactccaatttccgcgaaccacaaatcaaaatggcacctttctttgttctgtttctattagcctcttcattgactcaagggtatgctcaatttcaaccaaaaaacgaagcttttatatccttgttgattacccaaaatggccttgactttgtgaaggagttgctggtgaacaaggcaatttcctcactggtctcacttcgattgccaaatattgaaaagactgcgaaaatcccagttgtgggtaatgtctacatggtgctctccaacatcacaatttatcatatcgatgttgcttcctcgcatgtcaagccaggggagactggaatttccattatagcttctggggttacttgtgatttgagcatggattggtattactcttatagtacatggcttgtgcctgttaagatctctgacagaggtagagcagaagttcaggtatgaaatttattctttattttgtttgtttatatgaagaaagatttaattagaatgcaatttcaaagttattttatactgtcctccaattgaagattgtcagcaagtttgttgatttttataataattatttaaaagtcaattcaagatggtttctgattagttcacaatggcatgcatgtgttgcttgttgtttgttttttgttgtttgattggaatttataagtgttacttgttgtttcattggaatttatatcttaacttgtttaatttatattgtggattttggtatctaacaatgttaacttgtttaattataaataaactgcgccatgggctatggcattcagtatggaatttatatgtggtattcttgttttacttattttatggaaagttcatattcttatattggtatatgattattcttgtttgtatgggatgaaaatgatatctgttttatctttactattatttctgtttatatctgtccatcttcttcacgactgtaatcagaaaggaatttgattagtgctactgttgtaaaggttgaaggcatggaagtaggacttacattgggtttggagaaccaggaagggtctttgaagctgaaactcaaagactgcgggtctaatgttaaagatatttcaataaaattggaaggaggtgcatcttggctttatcaagggtatggaaatatccatattagattcaaatttcgagctcataaaggaacataggtttcaatgtttcctgtatcttttgtagcattatagaacttgtgctggctgcttatcctttctcctttaagtataagatgccttaggcctgtttactctgaatttttttttcattttctatttgtaaccagaaaactaaatggaacacaaggtagcattttgtaattaggagtgaaaataagaaatgaaaacagaaaacattttctcaaactaaacagctcgttacttttcttttaggtggttttctcaaggagaacaccttagctcccccctaatcctctatgacagggattggaagcttgctggatatcataatattattgaaagccctataatccacacaatccgcccttcatcctttttcttaactaaaaattgtaaagttggaataagagataatgttagaccggattatgcctgctgctaacagttacaactaagttcttttgttttttaacagttacaactaagttagggggttataatcccctacatctctcctatttttcctcatataaaccctggtaattggagggcctttcctatcaattcttctctttataatctagtaatcaactgtttcaaactggtcacttatttctagcttagaaacactatccctatctatcatcaccaccaggaggatttttctcctttaatttccaactttttccagctactctggtgaaacaatgctctaacatggtattatttaaaataggatgaaaatataccataggatatgtgttgttgtagttaatgttttctgaaattttgtaagtaaacaatatttggaggtttccattttccagcatatttagttttatcatcatctattcatacatttccatgtcacctttatctggcataaaaatgattttatggtttttgacttttagttttggttaatatctaacaggatagttgatgcttttgaagataaaattggttcaacagtggaaaatgctatcgccaagaaacttacaaaagggatttcaagccttgactcgtatttgaaaagtcttccaaaggaggtccccgttgatgatcacacttctatgaatgtcacttttgtcaatgatgttttatttagtgattcatctgtcggatttgaaaccaatgggttatttatagaaagaaaggtttccctacctattcttgacctcgacgacaagaactcgaaacttccaattttatgcacaaattcatctaaaatgctagggatcactttagatgaggctgtttttaactccgcatcaaccttatattatgatgtaagtttagatggtcggttatgatcttaaatcatgcacattctcaaaatattctatttttatcattggattggctcaaagaaaatgcttactgtgttcaggcaaaatttatgcactggattgttgaccaaataccagatcaatctctactgaacactgcaggatggagatttattgttccccagctgtacaagaaatacccaaatcatgacatgaacttgaatatatctttatcttctcctccagttgtggagatttcgaatcagaaagcaggtgccaacatatttgcagacatgacaatcgatgttttggaagacgatgaagtaataccagtggcatgcatatcattggtaatatcattaatatttatgtgtatgccttattcatcaccattctgaatattactaggatgtactagatattatgttatgataaattctatgggctggtgtggatgtaaaatgaagttcagcaagcttaattgtacaactttgagcagctctctttcatacccttttttctattaacagaagctaatccatatcagtctttgttagtacggtcatttatcttaaaacttggctaatcaatcttccagtctgctggattggcttgttggtcaagtggtcaacagtcattgctaggatagtaggttgttttggctgcagactatttgtgtttgccctgtatgtaagactcatgaatatttatcagtttaagggattgctataaatgattgcttcaactcaataatatatttttgattattcaactacaatgattgcttggtaagaaatagacaattttttgtttcctctaccttaccctagcatcgggaaaagctgagtttaaagaaccaatcatattagcagtttagttttgtagtgatgttgcaattgattgttattcaaatgaaggcttaagtgcaattttagtccccacattttgttcgatctgcaattttggtccctccattttaaaattaagacatttggtccttctattttaaaaaatctgctattttagtccttccatttcaaaaaatagagacatttagtccttctatcttagaaaaaaattcgcaattttggtcaaattctcaattttgtctacgttttatttcttttctgaaccataaacctaactattcagttaatgtaccattaagaaattatttaattagttacaaagtaagaaaataaaagaaataaaacgtaagcaaaattaaagattaaaccaaaattgtggattttctaaaacatggggaccaaatgtttctattttgaaataggggaatcgaaattgcggattttttaaaatgggaggaacaaatgttttaattttaaaatagagggatcaaaattgcagattgagtaaaatagagggaccaaaattgcatttaagccttcaaatgaattactaaagtttgtcataattagtattagtaaggtgctacttttttttttttagatatagagtaaggtgctactttgtttttgtgtatttgtgcaaggaatatattttatccagatactatgtgtatctattcaaccactggcggatagggggcacataattaaagaataatcagcttaaaataattaaagctaacatggtgtggtagactatgttagaatattgcgaatctcattgtgttgggaatcttatgatgttagtataataaatcttattgcaccagcatatactagttatgagtttttaagtataaataggtattagtgctttgcatcacatgctatattttcatcagatgccaattattcagaatctcttattttccttttccatctaaccccccataatttaaaattggcattggagctgtgccaccctccatgacctaatcctgtcaccaacacagctgccgaatttgcaaagtttatcagatcatgtattgcccctgtttgttgttgtaatgaattgttcctttacaatgaatgaccgctatggctacattgcatcttgtttacacaggtaattcaaggtacaggtcttgtcaaaatcaaaggaaacaacctcgtaggttctatcagattgaatgactttcaaatgtcattgaaatggagcaacattggcaatctgcggatgtacctcattcaggtgcctttatgtttcatgtttgtataagacgcgtgataacaagtactaaaattttaattctaaagtttctcattaatgaaggatgtgttgtcttttcctactgcagccagttgtgtggacgcttattgaaactgtcttcttgccatatgcaaatgcacgtctgagtaaagggttacctttgcccatcattcatggtttcaccttacaaaatgcagagataatcttgtcaacttcaagaattgcagtttgcagcgatgtagcttttgcagattcaaacaagcgttttcttcaatttcattgagtacataaaagagtgtgtggttattgttcatggagtgtaaatagttcaaatcagaaatcaagatgatacatctacttgtgcaatcttatttcatttgttaattgctacttgctgggaaatggggcaaccatctatacaaactttgatacaaatacttgcaccgccagttatcatgtaagtagaggtttataaaaccttgcaaaagaacatgtgcacatttggattagagttagtatttgaataaatttgatgttacaaacttggttttgattatgactgagtagattaaaatcattctagaaagcacaaaatttaaacaaaaaatcataatacaccaaattattgctccataaatatgggtccataaaagaaggagacagacatctccaatagcaaagtgaaggttcttatgtaaaaaaaannnnnnnnnnnnnnnnnnnnnnnnnnnnnnaatgagataaaagttttaaatctaaagtaaagtataaaaatatatttttcacattatttatgattctttttttttatattacaaacaaagaaagtatgtcctatatattataagagtatttaaggattttacatgtcctatataattatttaagaacttaaaataaatttcacatattatcttgcaaaataattttaatcataacttatatttgaactaatttttgatatcaaactccttcatcggcaatccctcataaaaactaatccctcataaaaactatcattgtgcaacacaattatgtatttcttatttagttttttatataataaaaacttaagtttaaaacataaaacatgttttgttgattacttgattctgattattttttctccctaatatataaaatttaaaatataatcaaaatcaattgcagtaaaaacatcaatttttattttctaaaatagaaaagcgaaaagtaataattatttataaaagagaaagagagtaagtaactttaaaattaaacaattttcataaattctaatactatatcatcaaccctgtcttcactaaaaaaatactaaataaatacattgtaatttttttttttttgaaaatgaatcatttaaaagaaataaaaataaaaataaaaatgttcttctcaaaggtcaaaacgacagtgttagcaagttaaccttatcctccaattccatcacaaaagtaccggtggttcaggccgacaccaacgttttcaaaacccacattaaaccctgctttctccccctctctctttctgttccaattcacagagaacaatgcaaatttctcttagcaatttagccttcaagacccctcaactcttcccaatacaccaccccattttccctccaaagccaccactgaaccaccaagtttcaacgcagagccatgtcaacaatgtcctgaaaggttcgtcggggtatttgtccgaaatcagcaaagcgattgatcacgaagaacagtaccgggtagcccggtcgcaggttagccgtaaagttttggacttggaaggttattccatagagggtctttcagttggaggccaagagacatgtatcataatccctgagttcaagtgcacttttgatattgggaggtgccctagtagggctattcaacaaaacttcctttttattactcatgctcatcttgatcacattgtaagattctccacttttgtcaccaataaccttttatgtgctggtgtttttactttttgggattagtaaaaaggggggaaacgggtaaattacacatgctctgtcttatcttattaggttgtattggttattgacagaaaagccagccaattcatacttgattaacatggcctaaaggctgtttagtatggaaacaaaatgtcttgtttttattttctgctttaagtttatatatgaaataatgaaaacataaaataatataaagctattttcactgtttcttgtataaagttttgaaaatggaaaataaagtgaagatgctgaaattttttgtggttcgatgtgaaaactgaaaatgaatgtagaaaaatgtttcctcaaaccaaacagtgccttaagtttttaatgttagaactcaggcctatttgtggttgtaacttgtaagggatcgttgatggcatacataggcatgttgaatgccaattcgattttagaggaggtttgggttcaagatgcattggaaaatgggattttagtaaaccaaacacactctaaaaacaacttacataatctaatgctgccctttctttttggaaggcatcaaatacctgtgaatgtgcttttgcatcctagtaatttgtttgtaagttatatgcattatgtgtatcctgtactttggatgtaaagtgtaaatttagcctaagggtgtgatgattttgaatgatttagggagggctgccaatgtatgtagctagccgtggtttgttcaatttgaaacctcccactgtgtttgtgcctccttgcatcaaagaggatgttgagaagctgcttgatattcacagaacaatgggccaagttgaattgaatgctgaagtggttgctttggatgtgggtatgtttcatttgtcttccgttaatgatcaggaaatatcttcaaggaatgacgtgtgaaatttcattttaggggagacgtatgagataaggaataaccttgttgtccgaccattcaaaacacaacatgttatacccagccaggtatcttttgatctgcattctgtagcccttgtcttttaaatgaagggtatattatatcagttttagaagttacctcattccttgtacaaaaaattggcccaaaacttaacaggtttcagcttaccatatttttgttgtcatctatatgaaattttgttaagaaatgccatttgggcattcccacattttgtctgctgaaaacacatacatgttttatgcagggttatgtagtctactcaatcaggaagaagttgaggaaacagtatgcacaccttaatgggaaacaaattgagaaattgaagaaatcaggtgttgaggtttgtaatattggaattcaattctgatttaagtcttctttgatctttacctttaatgaactctgctttctagattaccgacatgatattatcgcctgaggtggccttcaccggtgatacaacatcggattttatgcttgacccgtgtaatgctgatgcattgagagcaaaaattcttataactgaggtacgatacaatcttttagtgaaatgggtacaattatttcatctcccaagttcagcagacttttagaattgactgcttgatctactgaaatccttagaaatagagaatagctttatagattcagatctcaagtatgggacaataatatgtaagaagttttagcatcaattatcaaaacagccttcaagtctatttcattccataaatggacttttaatttagtcgttccttaactagttctttatgatgatcatgtttacaacttgaggtattgtcatgggaattttaagttaaatttttattttgtgcttggttatagtggaattggaaggaatgagaacaatagtgaaaaggatgagattatagatttttatggttactagttcattgatagtctagggtgtttctttccttgatggatataacaaaagattgcatgcccttttttatttttggttatgaacttatgactttcctgcttgctttctccttatgtatttcctggcagatttcttatcctttttctgtcatagtccttttctttttaaatttgcctttccttttaaaggaagagcaagggggggagagagagaaggatttcctgcttgtcatcctttcctctcattttttttaacaagccttttcctctcttattgaactctcttttatatattaaaaagaaaataattgttgcttgcctatacaaaagtgaagaatatagaattagagaatgggtgagcggctacaagtaaaatcttgtcagtaataaatcatatttaatgattttaatcttatatgggatattctctctttttcttttttcccttttatgtttaaccttttcttaatcatttttttctgacaattaattgtgacaatatcaattaacagtgaaatgaaattctttttattgtatcccaaaggtttgtcttcaccagttcacctaagttgatatcatcattacttttagactctgctttacttgaaaaaggaattaaacaatttcaaaaatgctattgccattttttgtagtgtgctctgacttctttattgctattttatttttctcttttttgtgtgattgatttgcttgttgaacctccgttaataggcaactttcctagatgattcattcagcgtagatcatgctcggcaacatggacatacacatttatttgaggtatgcaacatctttcactctgtcatggctatttatagttagcttgaccatatcaaagatgcacaaaggccaccttttgcagccctctcatacttgccctttctcttttatgttgctgtcttgtatgactgaggcagtgttcatgtttaatgcatatacatacttatcataatgttttcattatcaacagcttttgtgccaaatgttacagaagagttcaaccaagtacatagcttattagtcatatactatgttgcatttatgactcattttcatgtcatttcaagataaaaacctggagtctctacctgctcagacaaattctcagaattatgactactgcatgttatatttgaggaattcccaattagtaaacttatgttaattatgtagatcattgcaaatgcacagtggattcgcaacaaagcagttctgttgactcatttttctccaagatatactatagaggtaatgttatagtttttcttttagttttttaacttgcaaattgcatcccccaaggtctcatatctgcatggataccaattagatgcaaaaatccaagaattgtgaagtgtcttgaccttcctcttggaggggggcatattctcttgtaccaccacattaaatatgcattttataaaaagacaaaatttagatgcaactccttaagtgtttttgttggtgttgttcaatcagaatttaagttttaccatgataatttgtttaataaacatctgcgttaaagttcagcacagattatcaaaaagaaattccaattctgattagacaccaccaccaaaattttttaagaacttacatctaagtttgtccttgtaataatgttaagaaatttgtgcctcttttataagatacgcatttacattcttgatcctcaggatattcgtcaagctgcatcaaaattgcagtccaggttgtccgctaaagtggttcctcttacagaaggcttcaaatctatgtactcttaagtgttccaaatcagtacatcaacgattagagagagaaaaaatgtcactagttgtatctccgtttcatagtttcttgtaaattagaggtatatttgttttcagttttttttaattaaattaaatttaacttgtaagctttctatattagcgtgaatgagtagtctctacccttatgtaacttacaattacaattggtacaaccttaaagattatgttttgcccaacattaaagtctgtttcatatgtatatgcaataaagcattggttgatagtgtttttggcctaataataagtttgatttagatatctaaattgtcttgattaaagtgataatttagttcggtccctcaaaagaattaattacgccaattttattgttgaaagagagaaaaagttaccaaatagtcttttgaaattataaatgtggaatacaataatcctttaatcatcttttacttccttttttttttacataattagcttctggaagagcaaatcacgtatcattagtccttacaaaaattattagtgaccgaagttgattctttaaaacgttaaatagacgaaaaaattatagagttttatgtctacaatttttcaaaagtattcgatttatgtagaagtaaattaggttgagtgaaatttttagggactaaaatgggtgtctaatcttactttcatctatgattatttattatacgttgattattttttatgaatattctatcccgtttatatttttgttcttactgtcaaactttttgggatccaagttttctaaagtagataatttattttaaagagtataataacaaaactcagttgatgaataatattaatagttaatatttcatgtacatacataaataaatcatgaatgtgttaaaatattaatttttaatttctaactaacacctaaaattacttattattcacataaaattaattattttagagaaatnnnnnnnnnnnnnnnnnnnnnnnnnnnnnnnnnnnnnnnnnnnnnnnnnnnnnnnnnnnnnnnnnnnnnnnnnnnnnnnnnnnnnnnnnnnnnnnnnnnnnnnnnnnnnnnnnnnnnnnnnnnnnnnnnnnnnnnnnnnnnnnnnnnnnnnnnnnnnnnnnnnnnnnnnnnnnnnnnnnnnnnnnnnnnnnnnnnnnnnnnnnnnnnnnnnnnnnnnnnnnnnnnnnnnnnnnnnnnnnnnnnnnnnnnnnnnnnnnnnnnnnnnnnnnnnnnnnnnnnnnnnnnnnnnnnnnnnnnnnnnnnnnnnnnnnnnnnnnnnnnnnnnnnnnnnnnnnnnnnnnnnnnnnnnnnnnnnnnnnnnnnnnnnnnnnnnnnnnnnnnnnnnnnnnnnnnnnnnnnnnnnnnnnnnnnnnnnnnnnnnnnnnnnnnnnnnnnnnnnnnnnnnnnnnnnnnnnnnnnnnnnnnnnnnnnnnnnnnnnnnnnnnnnnnnnnnnnnnnnnnnnnnnnnnnnnnnnnnnnnnnnnnnnnnnnnnnnnnnnnnnnnnnnnnnnnnnnnnnnnnnnnnnnnnnnnnnnnnnnnnnnnnnnnnnnnnnnnnnnnnnnnnnnnnnnnnnnnnnnnnnnnnnnnnnnnnnnnnnnnnnnnnnnnnnnnnnnnnnnnnnnnnnnnnnnnnnnnnnnnnnnnnnnnnnnnnnnnnnnnnnnnnnnnnnnnnnnnnnnnnnnnnnnnnnnnnnnnnnnnnnnnnnnnnnnnnnnnnnnnnnnnnnnnnnnnnnnnnnnnnnnnnnnnnnnnnnnnnnnnnnnnnnnnnnnnnnnnnnnnnnnnnnnaccttcttcattataatatgttcaaagttcaaacccgtgtggttcatttggcccctaaaaaaatcatctctaaattcaaacataataaaccaaaaagtaacatttagtctttttaaaataagattgaatgtattttttttttgttagaattaggttacgagttaattcagtccaaccaaaattttcataagattttaagtttttcctttttgaaaattaggcataaattataataatttttacttaattaataagcataaaaagataataatattctaatgatagctatacaatttgtttagagctgtgaattataaatatttattagttctaatttcttaattttatgacttagttgtgcatagtgtttaaatttatatatttcatttaagtattgttaaattcagtcctaatctagtcaaaccatacctaactcagttcgtgagtcgaaaacaaaattccaaactaagacgtttttttcttcttgcatatatgcaacaaacactcactcatcatatgaactgtgcaaatataaattgatgtgtataagtgtaagtgtgtaatgtttgttttatgcaaggaaaatatttttttataataaaattacaaaataatataggcagaaaaatataatataaccagcaatcattttgtataacgcaacggtgttttttatattttgttaaaaattcaaaatatattataatcaacctattattgagagtagaatgacctgtgtgcatactctcttgagtgagtttcttcatgttgtcgcttctaaacttttatattaaattatgtccatattttcctctttaattaattattctttattgaaagtttgaaattgcttgtatttatatatttttatttattttattattaatgaaataattttcaataatcagtcctcttttattttaatttatattttatcacatttgacccgaattgacaaataattgtatagtgtatgcgatacttgttaatttaatatgtaaaactagagtgtaggtaaaattaattgcatagttttgaactaaatgtggaaattaataaccaaaatttagaaatgcccgattctcttggtccactgcattaatttcatgcatattttgtattttttaaaatactttttattttattttttatgaaactacaaaagtagttgactatgatttatgtgagagagcgcctttgaaccctgtcaatttcactgcaatagtttcatcatttatgtatgtatgaaatcataaattatctttggggtgagtatttgtaatttttattaaattaattttgaattgatacgaatgtttgaatattttatgttaaaaataaattaatagtaaaattcagtatattttttatatataatttaaaaactatttaaagttattctgatacaaaattcattttagaattaaaagtaatatcccaacctaaatccaaacacattcaaaattcaaattaaaggaattcatcataattgagctagctagttgtgctatcatatttggtaagttaatttggcagcatttttctatgtaagctgcgccaaactcgtgccgacattcgtatctaaggactcatttttgtggggccaaaggcatggaacttgacctatcaataacagagaattgacataaatttgactatgatatgccaaaaacaacacatcataaatggataaacctctccacaaagtcggttgatagataactgaatatattatgtgaattgattaacattttattatgactatgtatgtatgtagaaaggatttgttacttgaggcaaaagacctatttggaaaataaacttttctatcgagttaaaattaattttatactataagttaaaatctgcttttagaaaagttaaaaaaaaaatttatcaattagaacatatataacccaactttttttgtgttatacttttctttttgtgcttaaaaagttataaattaattctttcaagtgttgaaatctatttaaaaaattgccatattctaataggtgctcttttatatacacgaatttagagtttgaatcgcttatcatatgcctaagagaaaattttatctattaactatatcaattcatatgtattattattagcatggttttaaattaaattacacagcagatgtgattatattactgatgtcccgtgttgtccggatgatctattatcatatatgattcgattaaagggggagaattttattttacttttttgtcaaaaatcttgataatcactataaatattttttttctttgataaaatacacagagacataatctttgaaatagcgatgttaggatttaaaattctaattgatgacgttacatgtaaagtttacctgaaatactaattcgctttcactaccaaacatattaggtaaataacttgtttgtttagcttagctaatagccaagatacttttacaatataataataatagtataaaacaaaatgggcttgctcttgcttcaaattaaattactctaacattgacttaatgtgtatttggatctannnnnnnnnnnnnnnnnnnnnnnnnnnnnnnnnnnnnnnnnnnnnnnnnnnnnnnnnnnnnnnnnnnnnnnnnnnnnnnnnnnnnnnnnnnnnnnnnnnnnnnnnnnnnnnnnnnnnnnnnnnnnnnnnnnnnnnnnnnnnnnnnnnnnnnnnnnnnnnnnnnnnnnnnnnnnnnnnnnnnnnnnnnnnnnnnnnnnnnnnnnnnnnnnnnnnnnnnnnnnnnnnnnnnnnnnnnnnnnnnnnnnnnnnnnnnnnnnnnnnnnnnnnnnnnnnnnnnnnnnnnnnnnnnnnnnnnnnnnnnnnnnnnnnnnnnnnnnnnnnnnnnnnnnnnnnnnnnnnnnnnnnnnnnnnnnnnnnnnnnnnnnnnnnnnnnnnnnnnnnnnnnnnnnnnnnnnnnnnnnnnnnnnnnnnnnnnnnnnnnnnnnnnnnnnnnnnnnnnnnnnnnnnnnnnnnnnnnataaaaaatacaactttcttacagaattattaaaaaatattatttcattctaattatatttctaaatttccttaaaaaaaactacatttctaaatatacataaaaaaattatatttctaaatcaaggttcaaaataaaatttataaaggctaagcacttagttttgttaaaacttaaaagaatttaatgatcaaacacttttaagttagtataacttctaagtttattattataaaaattaataaatttatcatacctaaaatgagttataactgaatgataatatatgatttttttacactgttaatgtatcacctattttattaaatttaaaagactttttaccttaaaattaagcataatgtaatttcaaatcaaagttataggtacaaaagtagtttagctttattaaaacgctcaaaatgaaagtatcgatgcttaagaaccaagtcatgacaaataatttatttaaaaaaagagtaaaaacagtaatattttgaagaaaaaaaattggggagacgttttttttcagtcggtgaaaactttcttgaaggagagaatttatttccattataattgttaatatgtattgggcacagcaagctagctaatccgatctcactacaatggtagttaggttaaaaaaatgacacgccaaaaacagatagtattgatttaactcacttaacttatgaaataggtttgaattgggttaatatgttagaaagaaattgtaaaatgaaaatagattaaaactatttgggaagacatcaatcctaatactcctttgtccttcaagaatggtgcctattggtgcaataagatgttagttggcttagtggtggagttgggcatccaatcacaacgaaagttggctctctcacaatgaccacctgcaaacactctgatagttaagataatagtgattttatcatagttttgtgtttggatgggaaaaaatgtatttatatgaagtcttgggtgaaggtacttatgggggaaagggaggtgacatgaatggatagatcattagatcatcttgttagtcttttattgcttttacattagtttttgagtcaaaaggagatcaacaatatgtgtcaagagaaaatgcctataatttatatcaccaagtccatgcttaattaaaaatgtgcacattttgtggtctgagatgattttgccatgcaccaacaagataaactaccgagatgccatcctgggtgttgagacgaaagtgccctgtttgattaggccaggtccttagaccaatattattgggcctaagatgggaccataacatatttttctacttaattactaatatttccttttttcatactgagttcactattcattgatgaagcatcatgtttcattcatcatcaactagagcgacgaactaccatttgtgaacaatgaaatggagtacaagcacactacttgaggagaggtcaaaacaattatatttcaatttgagtgttagttatggtgtttagagatttgaattttgggtaaaaatatgtaggatttgtgtgttgacggaataatgagatttgaactaaaaatagacatatgaaataatagaagaaataaaaaaaattaaatttttatttgttatatcttattcttacattgatttccaccttattcatgtaataataataataataaaaaagttgaaatcaatgtaagaataagatataacacgtaaatatttaataaaaaaatttcttctattatttcatccgtcttttatctttagttcaaatcttattattattaactaactgttaatattttttcctacttatagcaagaccttttctattttttctaatccaattttgttaactttcatacttcataccattatcacctaccacacaacacattttatatatgaaaatacatgtatctatatcattttgtagtatacgtctatacgatactatcttcttctttttttataaaaaaaaactnnnnnnnnnnnnnnnnnnnnnnnnnnnnnnnnnnnnnnnnnnnnnnnnnnnnnnnnnnnnnnnnnnnnnnnnnnnnnnnnnnnnnnnnnnnnnnnnnnnnnnnnnnnnnnnnnnnnnnnnnnnnnnnnnnnnnnnnnnnnnnnnnnnnnnnnnnnnnnnnnnnnnnnnnnnnnnnnnnnnnnnnnnnnnnnnnnnnnnnnnnnnnnnnnnnnnnnnnnnnnnnnnnnnnnnnnnnnnnnnnnnnnnnnnnnnnnnnnnnnnnnnnnnnnnnnnnnnnnnnnnnnnnnnnnnnnnnnnnnnnnnnnnnnnnnnnnnnnnnnnnnnnnnnnnnnnnnnnnnnnnnnnnnnnnnnnnnnnnnnnnnnnnnnnnnnnnnnnnnnnnnnnnnnnnnnnnnnnnnnnnnnnnnnnnnnnnnnnnnnnnnnnnnnnnnnnnnnnnnnnnnnnnnnnnnnnnnnnnnnnnnnnnnnnnnnnnnnnnnnnnnnnnnnnnnnnnnnnnnnnnnnnnnnnnnnnnnnnnnnnnnnnnnnnnnnnnnnnnnnnnnnnnnnnnnnnnnnnnnnnnnnnnnnnnnnnnnnnnnnnnnnnnnnnnnnnnnnnnnnnnnnnnnnnnnnnnnnnnnnnnnnnnnnnnnnnnnnnnnnnnnnnnnnnnnnnnnnnnnnnnnnnnnnnnnnnnnnnnnnnnnnnnnnnnnnnnnnnnnnnnnnnnnnnnnnnnnnnnnnnnnnnnnnnnnnnnnnnnnnnnnnnnnnnnnnnnnnnnnnnnnnnnnnnnnnnnnnnnnnnnnnnnnnnnnnnnnnnnnnnnnnnnnnnnnnnnnnnnnnnnnnnnnnnnnnnnnnnnnnnnnnnnnnnnnnnnnnnnnnnnnnnnnnnnnnnnnnnnnnnnnnnnnnnnnnnnnnnnnnnnnnnnnnnnnnnnnnnnnnnnnnnnnnnnnnnnnnnnnnnnnnnnnnnnnnnnnnnnnnnnnnnnnnnnnnnnnnnnnnnnnnnnnnnnnnnnnnnnnnnnnnnnnnnnnnnnnnnnnnnnnnnnnnnnnnnnnnnnnnnnnnnnnnnnnnnnnnnnnnnnnnnnnnnnnnnnnnnnnnnnnnnnnnnnnnnnnnnnnnnnnnnnnnnnnnnnnnnnnnnnnnnnnnnnnnnnnnnnnnnnnnnnnnnnnnnnnnnnnnnnnnnnnnnnnnnnnnnnnnnnnnnnnnnnnnnnnnnnnnnnnnnnnnnnnnnnnnnnnnnnnnnnnnnnnnnnnnnnnnnnnnnnnnnnnnnnnnnnnnnnnnnnnnnnnnnnnnnnnnnnnnnnnnnnnnnnnnnnnnnnnnnnnnnnnnnnnnnnnnnnnnnnnnntctttattatacttgatgtaatggataagactattttaacttattctaaaaatataagattaaattgaatttttttgaaaaagatattaccaagaatattaattaatgaattaaaaagaaaaaatatttattatgaaaataaaagtataaaaaaatatacaaaatttactaaaagaaaactagaagaacttagaaaaaaatatttaatatatcgattttataagattttatataatatgtaacagatgaaaaatattttaataagatctaagtaaatcctttagagcatttttagtataagattttaagtaaaaatattaaatttaaaatctaaataaaagagataaataaatcttcaatgtagaaaataaattcttaaaaaataatccttaaaatttataaatgtttaaaaaatagaatatatcttcaatcctacttaatattatgaaatatataaaaaagtgatataacatcatagtttgattgggatctagtctaaattaattagttgtgtttagtgtctcaaaatatacacaatttactaaaagaaaactagaagatagggggagaaaaggcttttcgagttatgatgaaaggaatcatgattatttacccgaaactaagagggttgagtgtgaggcaagttgtgtttttacgagatctagtctaggataggagaataagaaacctggattggtcacgtgccaactaagaatctcgaagcccccaaaatccaacaactaatacatataccaaaaaacttcaccgctgtgtcatccatcaccccatgaccatgatccaatccatccaaatccctctctataatgccttcatcaaaatccagtagtaggaacgaaacgattgagtaatcctaacttgatgatactagtccttagttgataacattattatcacatcaaacttgcaataacaacgaaacttcctaaccatttctctttctctctgttttcacttctctctcttctcttctcttctcttctcgtctttacatcacaccctctttcccccctttgccaaagctctaatattttctccctccaatccccgctactccacttttcttgatttgggtgtctcgttttctcagttttgaatcctttttctgttctgggtctttctcctcttcgaaaaggatctgatttttcgccctgttttgattcgaatccctcgcgaaccctctttctcgatctgggtgtgaaggaaaccgttttatccttcaattatgaggaaaagggagagggagaatccttgtggcgtgtgtggccactatcacaaatatgaagaaggggaagtgtgttcgatttgcggtcaccgaattccggttggatcggagaaaacttcgatacaagttagtgcttttccatccgttgttctgccggaatttctttacctaggaagctacgacaacgcatcacgctcggagcttcttaagactcaggggatttctcgtatcctcaatgtaagaggggtgttattgtctttttgaatctggcatctccgcaatttcaatttttcgatgattatctatgaatgtatgcatgtgttgatgtttactgtggaattgtggggatgctggttggttaaatgttgcggggttttgtttttgccttgggttattatgttttgttgtttgaggtttcagtttttattgagtaattgcaggtggtgtgttttaggttaggggtttccttaacaatactcttctagtttctaagtggccaatgatgtttgagtctttattttcttatactaatatttattgagtaatttgtaggtggggtggtgtggtgtggtttgggttaggggtttccttaacaaatactcttctagtttctaagtggccaatgttatttgtgtgttaatacctttgaattttatgtttgtgcagaccgtcccttcttgtcaaaatctatacaagaactcgtttacctatcactgcctcccagatgacaaaactttgccatttgatgaagcaattcagtttcttggtatattcttttgtgttcattatacttatcatttcatttgcttaggtgcttctttaacatggatttgcaatttttaattaatacctatcaaacattatacttgcacatagtattggaactattggaacgtcagcctactcttcatgcttaatacaaataagtgatctgctttgtgatcttctacctttattgcatttgttatttcttatttttttcaaaaaaaggtacaggatatgttgtatttctgtcatagtggttgattgttcttctaaaagaatgggcacatttcctttcacgatgcctttcgcacttctactttatagattgctctatgaaccatctagtcaatttatgtacaattaacaagctgtaaatggaaaagaaaaggcaattgtagaatcacatagacctgggatgtttgttcttccgggtctcaaacttatctttgtacctccacctcaaaaaccttgttcttctgaaactattctcacttaggttgcaataagaaattacttcattctgttatatttatgaaccactctactcttctctttgaaaccaaatgttgcctaaaattacaatgtcgtattttgtccacttttacctatctgtgagtgttctcaaaaggacccgcttaaagtcaatattgaagaaagattcttcagcaatttgattatctgagagcatcctggccatctatcagtgtatcacaataatttgttatattttttcccctcatcatcagcatctatatccatgacttcaagttcttgacatatttaagattcttttaggggcttagactttcccaatagtgcataattgagttggagtaaagtagaaagctttaatctatttttcttatcagtgagcaccatactgattgtgtactgagataaataccatggtgaatagtggcgtggagaccccccaaatgctgtagtgggataccggatgaccaccattttgactccgacatagatttaaattgcacatatatatgctgaaaaataaacaaaaatacctaaaagtaggtataaatctggaaacaattgaacagattcaatgtaatgcaattagtataaacaataaagaaaaagaagtttaacactcatgaatctggaaatgcaagaaagcttccagagaaaagagaaagtatttgaagaaaaaatcttggcctgtccaactaggttaatcttctattgaaaaccaacttgtcaaaattgagcgaagtgggaggctttatagccaacaccaactccatgcaaatgggaaaaactgttattggttcatcgttgaagccttaggtatttgaagctgaattgggcgctgaagagaaagtgtagaagctagggctggcgggcaccaaagaagaaagtgttgaagaaagaaaagggattctaaatataacgttataggattttccaattttacccccataaaaagcataaaacgacacttaaaaaggggttaaaaatctggaaacaatggaacagattcaatgtaatgcaattagtataaacaataaagaaaaagaagtttaacactatctggaaatgcaagaaagcttcaagagaaaagagaaagtatttgaagaaaaaatcttggcctgtccaactaggttaatcttctattgaaaaccgacttgtcaaaattgagcgaagtgggagatttatagccaacaccgactccatgcaagtgggaaaaactgttattagttcatcgttgaacccttaggtatttgaagctgaattgggcgctgaagagaacatgtagaaattagggctggctgggcacaaaagaagaaagtgttgaagaaagaaaagggattctaaatttaacgtgataggatttcccaattttacccacataaaaagcataaaacgacacttaaaaagggggtaaaaatctggaaacaatggaacagattcaatgtaatgcaattagtataaacaataaagaaaaagaagtttaacactcatgaatctggaaatgcaagaaagcttcaagagaaaagagagtatttgaagaaatttttttagcctgtccaactaggttaatcttctattgaaaaccaacttgtcaaaattgagtgaagtgggagactttatagccaacatcgactccatgcaattgggaaaaactgttattggttcatcgttgaagccttagttatttgaagctgaattggatgctgaagagaaaactagggctggctgggcaccaaagaagaaagtgttgaagaaagaaaagggattctaaatataatgttataggatttccaattttacccccataaaaagcattaaacgacacttaaaaagggggtaaaaattctcttcttgcccgtaacactgggagcgactgcacacagttgtgaagggcatgatttgtgctctgattagtgcagcaatgactgcaactagaagatgtgatacaatagcttcacaaggagcgggacctacccgtgacattgtgatggtgcaatcatgccacaaatgctcgctattgactattctgtgatagacacgtgttatgtgctgcctagtatagatagaaaggtgctgtggaccagagatcagggtgtgtggatgctctggtgacaatgaccctttgttctctaactctgtcggtaaccgtggtgaggtgataggaggtgaaacacaccctagatctatagatttagtatgaccagttgccaaggagagagaaaaaggggtggctgaattttttgttgttgcaaatatatagtaattaatgagagagaaaattatgaagagccccaaaagttaatgttcatgaaaaggaaataaagatattattggtcttacaaacatccttttacaaatttctgttgttaacaatatattttaggttattttaaatgttgatcatgaatcaaaggtttgtgatatgttttgattcatgattcccagataggtcttttgattcacaatttgatgaccagtacctcgaggcaattgtcgttctatcctaaattgtctttcaaaatgtctaagccttattgaaattgtgataaactaggtaattttttgtggtttttcacctattctccgaccatcttttctctctgctaatctgcccccatcttttctcctccagtattgttaatagttagttgatggggagacatgtttgtgggcttgtattgtaaactttgttgtatttccatcattgcataattaatatctaactaataaattcttcagtgtattaggcttgatttgaactttttatctctctaaatttttttctcatttggtttagtttaaatggccgctattcaccataacattctctgtttaagtttagttttatattcaattttgcatatatttgttttccagaatgtaatcagcctaaaatgttgacaacattaatgcaatatatgagtaacacttcctatgctgttattccttgcattgagttataacatttgatttggctaattgaaactaactagtaatcaatagtttcttttttttactattggcaatactattttctccaatatttcttcctttttacccttgataatgaagtgagtgctgtgggcttccttttcagagcaatgtgagaaggataaggagcgtgttctggttcattgcatgtcaggaaagagtaggtaagatattgctgcaagcgtgcaacatgctatcataagcatgacggttacatttgaattagttagtgatatgaccctcagaaaataaaagggaattgatataggttattgtactgcagcctttcaaatgaggaatgcaatatacaaatgctataattttctctgaataacatgtatcccatggcaggtctccagctattgtgattgcatacttgatgaagtccaaaggatggagacttgcacagagttatcagtgggtaaaggaacggagaccttctgttgaattaactcaaggtatgtttgtttactgtttccatttttgcttccagtctccagtaaagccatcagattgcagtgttggtcaattgaagactcttatctggccaagttatttgtttgaagaccattatagaaacttcatcaaactaaaaggaaaacatttgcacttccaatctgtccacttgtttgaccatctattcgctattgtttttcctttgttaagccctgtgttttctggtgatccactaatgcctgtttgttggttgggtttcaacaaaactctttctttgtgcccttgtctgtcgtaggactgattcatgcacacatcagtaatttttctttttctttttttttttttttgctgtcatgtacagcacttcacaggtcacaggctcacagctcactaaatttgattgcatatgttcttattgttctattttgttttttctattaattttcatcacctttgtttctttcccttattgttcccttatacttgacttctgtcattacattatgctttagataaatggtgtctggactctggactcgtcattttttactattaatggctattctgctatctgttttcccactacgttgttttttggggtcatacaggattgacaactatgtttttttgaggtcatacaggattgacaactatgttttcacatgcatgtttacaccatgactgtttcttcaaaatgaagcaaccattttcatacagtaatagaataccaaggtttttaccctttggtaataaacaaaccatcctgttggaattgacacttatgtatgttttttctatatcaagtagtgaataatttcagggtttgggtgcctttcacgaggctaattatcatctttctaacatccatgcttccactcttaatataggtgtgtaccagcaactgcaggagtttgagcaaaagatctatggcccgatcgatagtggaagctctctgctgcctggtttctcgcctacagcacctccttcaattagctttggttttccaaagatcaatgatccagctcaacttccttccttcagcactgctggaactccttcaatcttcgcgcgagcacctctagaaattgctcctaccgagtttacattcggcgccggtcagacccagaagaatgtggctggaaatccctttaatgcaaatccagcaaatccaaatggcactgatatccaaatggatggttcttgattcttcaccagccacttgtgtgattaagctgcttgacaatttggcttgtggtaaagtttgcaaggtaccaccaggctgccatatttcaagtcaaggtgcagtaatcataagtgacttgtcaattctacaccaacttcttttttccccatgtttttctcaaatcttttcatagttatctctggttgtactattgagatacagcatatatttactggactcagtagatcagcgcgacaatatccagtttttaatattagaattaaaatcttatttacaagttatacaaatagtaaacaatccagctgtggaaccgctgttttgaaatatagaaaaattcatggataagtttttgaaattcatcatcagttttccacctttatttttttatcaccgtaccaaactaaccataagatgcttattatttgagactgaatgtaattttctgatcttgcgttttgtcccattacgtaagcatattaagttattcacgtggaaccgtcaacatttcaccacttatgcctcagtcatctcaccatcaacattaacattattttgtactctatcattcactttatgcttaatcaggcccagctcaataatatatggtgcattaaagtcatgttctacatttatggctgagttccatgcaaaagccttgtcaattcatttaatagtacttggcaatcaccatttttccgtggtttctctcctctcctcttatctcaaaagcatgaacaagttcctgtatctgttctatatttcttgccgtttcggtctttactgttcaagtgtctacatagcatttcaaattagaccaaattgaagtgtgttttctttctcctgcaatactaaaattgcatttctatgttttctgtaaagggaggatgagccttgatacaatgctcaagtgtttgtctgattttacgatggaaacttctaaatgatcattgaataaaaagtttttaattcttccttatgaatatgaaatatgcatgagaatatttgtctgttctaatgttaaattatatacatccaaagttgccatctcatgatttgaatgtcatatgtttaaatctgggaaataaccttcctgtttataagaataaggttggtaagcttccgattcataagaaacaacccaagtcgatagttttnnnnnnnnnnnnnnnnnnnnnnnnnnnnnnnnnnnnnnnnnnnnnnnnnnnnnnnnnnnnnnnnnnnnnnnnnnnnnnnnnnnnnnnnnnnnnnnnnnnnnnnnnnnnnnnnnnnnnnnnnnnnnnnnnnnnnnnnnnnnnnnnnnnnnnnnnnnnnnnnnnnnnnnnnnnnnnnnnnnnnnnnnnnnnnnnnnnnnnnnnnnnnnnnnnnnnnnnnnnnnnnnnnnnnnnnnnnnnnnnnnnnnnnnnnnnnnnnnnnnnnnnnnnnnnnnnnnnnnnnnnnnnnnnnnnnnnnnnnnnnnnnnnnnnnnnnnnnnnnnnnnnnnnnnnnnnnnnnnnnnnnnnnnnnnnnnnnnnnnnnnnnnnnnnnnnnnnnnnnnnnnnnnnnnnnnnnnnnnnnnnnnnnnnnnnnnnnnnnnnnnnnnnnnnnnnnnnnnnnnnnnnnnnnnnnnnnnnnnnnnnnnnnnnnnnnnnnnnnnnnnnnnnnnnnnnnnnnnnnnnnnnnnnnnnnnnnnnnnnnnnnnnnnnnnnnnnnnnnnnnnnnnnnnnnnnnnnnnnnnnnnnnnnnnnnnnnnnnnnnnnnnnnnnnnnnnnnnnnnnnnnnnnnnnnnnnnnnnnnnnnnnnnnnnnnnnnnnnnnnnnnnnnnnnnnnnnnnnnnnnnnnnnnnnnnnnnnnnnnnnnnnnnnnnnnnnnnnnnnnnnnnnnnnnnnnnnnnnnnnnnnnnnnnnnnnnnnnnnnnnnnnnnnnnnnnnnnnnnnnnnnnnnnnnnnnnnnnnnnnnnnnnnnnnnnnnnnnnnnnnnnnnnnnnnnnnnnnnnnnnnnnnnnnnnnnnnnnnnnnnnnnnnnnnnnnnnnnnnnnnnnnnnnnnnnnnnnnnnnnnnnnnnnnnnnnnnnnnnnnnnnnnnnnnnnnnnnnnnnnnnnnnnnnnnnnnnnnnnnnnnnnnnnnnnnnnnnnnnnnnnnnnnnnnnnnnnnnnnnnnnnnnnnnnnnnnnnnnnntttttatgattattgataaataaaaaaagttgtatggaatcttcgttgctcttatcgtttttataaaattgtgaagatataaaataaaaatataactccttatcaaacaagtccattaaaataaacttgtttttcctatcatttttttagttggaggctaatatatgcttgtcaaggttgcctctctccacaataagtctttcaaatatgagcataggagaaaacatttactaagggagtgggggacccgtgcatataaatagtcttgtatctaagtagctacttatagtataggaaaatctagtgtgattaaatatgaaaaagagtgagattattaaaacagttttattatttgtacagtacattacgtgttgcatatttttttctgattaaggtagaataatttcatgtcagttcaacacgtttgatgttttttttttattataaaataaatgatacatatataagtcatataagtgcacaaggagtgctggaatacataaaggactagataactccagtacgaggtaacaaagccaccaccaaaaaataaacactaactgactgccacataagaaaaaatcctgacgctaactatgccattatcatctttgcatatgcatattgaatatgccaatatgaatcccatagtactgtctactctgcagtggcagagtcaaggccagatcaaaacaatcatcatggcattacctaaagatatattttttaaaaaaatttatttttttctaataattatatatatttatataattaattaaaattaaaaataaaatttaacactatctcaaaataaaatttgacactacttaaaatttcacattacctaaaaataaaacttaactcggtcactctgaacctcaatttgcatatttgcccacccacccggcaaatatagtaagaaaacctgcaagtgagatgtgccctcctcttggctattgcaaaaagtgcaatttgcatcagccaaggttctcaaaaagattctgttttgtctgcacttaccctgcataattctccagactaaaccctgtatcttagaaggaaccggagtgctccatattaattaactaagaagcttttcctcctcccaaacacgttgcatataaatagtcttatagctataatatatcccaaaattaaaggaacaacttttcttgttttatttctgttgtccttaataaaaacccttcgagaactcatgcgggtttccccaacacaatcttgttggttgctgttatcttaataattccacatatattcactttctcccttcccaaataaactataaatagtataaatgatataaagtacaattgaagattagatgcgttcacgcatttgtaattgttggatgaagctcaattgatacatattttaatctgataaatcaaatttaaaacacacatttgagatcttaactatccgattttaatccaatggttacaaagcatttgactccgtaaatgcgtgtaatttctgagtgcatgcaggctatccagatcaatgaattaatacatcgttatttctcatcattgaatgtgcattcacgtacaatgctacagcaattgacaacagcatagaaagcttttaacctgcattgcagtggcctataattgcaaagctggtgaagtaatatttaaagtggattgctatatagctgttcacctagctagctataaatccatgccaaccgaaaaggaaacaacattttcaaatcgcaatagtatttttattttctggatcctacatacatttaaccaaccaagaccataaagaagaataaaattaagctaaaccaaccaaaatgaattcctcatatcccacaaagaggannnnnnnnnnnnnnnnnnnnnnnnnnnnnnnnnnnnnnnnnnnnnnnnnnnnnnnnnnnnnnnnnnnnnnnnnnnnnnnnnnnnnnnnnnnnnnnnnnnnnnnnnnnnnnnnnnnnnnnnnnnnnnnnnnnnnnnnnnnnnnnnnnnnnnnnnnnnnnnnnnnnnnnnnnnnnnnnnnnnnnnnnnnnnnnnnnnnnnnnnnnnnnnnnnnnnnnnnnnnnnnnnnnnnnnnnnnnnnnnnnnnnnnnnnnnnnnnnnnnnnnnnnnnnnnnnnnnaaaagaaactggactctagacttggcaacaacttgaaaacaaattcttattctagctagcatgttttgaaattcgttgggaaacgaaggaatcacatttaggacattgaagctataactgacagcttctgaaaatcacatccaaaacgtgaaaaatcacatctgagatgcgaaaccaaacacgctagaatcacatcaatgccccaagacattgacattgttgtgtgcaacatttggagagtcatcaccatcatcatgatggaaatgagaagcaaccttcctcacttcccccttgaaagtgtcatcaatatcaccatacaatccaagagagtcatcttcatccgtgcattcttccactcctccttctgggtggctggatccgcacccttcactcggatcttcgcgcttcacggcatgaatggtcggaccatcgtcatcgttgccgctggcctcggtgcccttcatgcaccacatgctaacaatgagaactccaagaccaaaaacgagcatgcctttgctatatttggccattgctagcacaagatattggtttagttagtttagtctttgagcgagtgataaacaaagttaggtagaaaagagaacgtggggtaatttaaagggaatgttgtttactattatgggagcaatatttaaggttgtggtttagactttagagttggaactgatcttaaggtagatccacttgaagctggaaacatgttatgttgtgcgtagtacaaggttctaactacacacgtggaaagtgaagatcggctatttttaggttgaaacttacgtgtaatgatggttaacgttgtaaaagttgcaacaatatgcacaagaagttgcaccgaactaaagatgtgtcactgtgcatgttgagccacttgtatacttttaagttcaacgtacgtgtttgggaaaatttatttatatgaaaaataatgttttatttcggaagtttgtttagagaattgatacgcattgaggtagtaaatattttcgtaaaagttgaatcttcatgttaatgttatcaattgcttacattctctaaaaaaacaaaaatggaatgtacatgtgtgtgattagattaatattacatctatctttttttctctctctctctcgtcattctcttcttccgagcgtgtatgtatatcccattggagggtgaaaaaattacttttgtcataaaaaacaatgctaatatattatcgccattggtgaatatatactattattgtgatacgaagcttttatattgatccaaattaattaaaatgcaacagaatggttttcattaattatataatgtgtaaaatgcattcacctcatttaatttttattttaatagaataacaaacggtgccagagattttgtccttgcacccgacctctatagtacttagatataaatactacctaggttccacctttccagcatcaattttactcaaaatttggtcaaatttgaatcccattccataaacatatagcagctaagtgagctaactgaaaatcatgacgaattgagtcgctgaccccatctcatttatttatttgttattattaattacttgtagaacctatttagatgttagtttctctagaaatatttttagaaaataaaaataagaagaaaaaatgaaataaacttttctataagctaaaataagtattttattagctaatttatagattccatctcatcttttagagaagctacaatggtgagcttttacaaattagctaatgaagagcttatttttacttatgaagaagttcatttcattttttttgttcttattttctttttctaaaaatgtttctaaagaaacttagttaaataggtccgtagtatagttaagttaggatagaatagaagaatagtgacttggtagaaagttgaactttgtctagagattgtaccgggctgtctgcccaacgtttagtattttctgttgggcctttggccctcgtttacgcctccaaaaaaagggaaattttattgatttatgtttcatttggacccaaaagtttttcaatgccacttatattgtacatataactaatttaattagaagagaccagggggttggtttgtttaatacttaatacttactacttagtaggtagaagctactgcacatatttaataatttttcatatccatggtggtatctatctgatagttgtaggaggcagttggtatctatctgatagttgacaccaaagtagctacccagtgtgaactgagccatggtggccacacccagctggctggggtcttccatcaaactcatgattttgttgcacctattctgctttaatgttgccagttagaattcaatataatgtaatggcttctctaacatggctttgcacaacgtttacaatttagaagatgaacccatatatagctatatttatgttctcccctgccatcctcaactacaccttacccaatatcacactgtgtgtcttcattttgacaaattttccttggcacatcttgcttttcttatgaagtattttatttttataaatcatagtaattaaagtccttgactctctagtaggacctcaaatatctcaacaaacttcgtttcattagattagttatgaaactaatttttgattcagaacttaattatatttaaaattcattgttttttttttccaaaaatttattatgaaattcgctcttgccattctcatttaattccaaaatcatctctaatgaaaagatcattaatttaaataccaatataaaaaatcttaaatccgacagaaaggaaatttcatttaaaattttaggtaaaatccttaaatttttatccaagtaagaataaaaaaattgcaacatatagactattggtattattttttttttcttttgcagccataatggtaggatgatatcagtattttttttatttgtaggaatcaaaaataaatattgaaaaatttaaaataatttatatatgacgtttaagcagcttatttagattccttatgtgatgacattgctgtgattttgtgattgcaatatctaacttataaacgagcgaacaaagcatttaattagaatcagtgacattggcaattttgacctctgattttaagtccaatttttatatatccatgcatctattttaattacaagtaaacaaataatttaactactatgaacaaaataaacatgatagtgattgggcgcatatcacactcactctattatcatataaaatttaactatattgacacgaccaaattttaattttgccggtgaactgtctcgaaagtctgaattatgaaaggaattccctgcaaacaccaggggcgtgtatcgtgtatgagtagactaatacctgcaaattacaatccccaaaattgaaatcgaaatcggacttctaatataaattaaaatggcgatcatgtcaagatcgataaaacctagacaagacactaaatgtgtgtttgattgtgaagaaatagaaaaaattggaaagaaatttttaaaaaattatgtgtggattaatttcacatctctctaatataatttaaatatttcttaattttcttctgctctttactctttcacacaatcaaacttatcctaacggactgtttgacaggaagaagatcataagatggataaaaataataggaaatagaaaaataagatgannnnnnnnnnnnnnnnnnnnnnnnnnnnnnnnnnnnnnnnnnnnnnnnnnnnnnntaattgatttttcattcaaaaagtagtttgttatttctgcggacacacacatgtaactatccacaaattttataagtatccatatgggtattcataaatatttgttaaaaataaattttaaatagtgtaaaataaaaatattttgaaaaaataattagactaaaaataaataattttaaaacatatatttatactacaaataaattagagaaatttacttttgtatataagaacatttaagtaatttcaaaattgtgggatccgtaggtacaagtaccttactgtttttaagattatgctagccctcatcagttcatttatcctccttcttgtattgttgagatactgaaataatatgagcattctttcgtcaaaaaagaagaagtaccttactatatttcctcgccccactaataagcaggtattcattaatgtatccatttttaactcgtagtaggttttactcacagatatatacgggtgcatgtttctaatttttgccatctctaccttctctattgcaatctatatactacatgtgcaaaatctaataatgtggttgctcacattatttggaatgaatttgataatatagaaattatcatatctattaaataatatgtaacatatcatcatcctttaaaaaaatgacaacatatcattaaattataataaagagtatttttttaatatatatcaaaacataatatcaaatactcttttggatccctattataaggtttaattaaataattcattattttttaaggaaattattattattattattattattttcaaatattacaagaaattgtaaagattaactgatttttcacccaaaataatcaacaagttattggttgttgagtggtacaagtttggcatccttaagtataaagtctcaagtttaaatattgtggatgaaaaaaatatgatgaagatagaagatcacactaaatgtaataagacaggttttgtagcgaaaatttatcatcaataaaatttgtgaacatttcataccaattaatgtcatggtgataaaaaaaattcaaaaacatgttaattgtttttttagaatgtcttagtaaactttactgtatatcttgtttttcacagtttaaatttctatctatccaaatagatacattcagtattcagtatttcactattttaaacagagctgtattttataaattaggagttgttaggaggaatcacataatgaatatctacttttgccggagagacaacatctctttggacaatccaatttgtatttaattttatgtaaaatataattaattgatatattgagatacaacatctctttggacaatccaatttgtatttaattttatgtaaaatataattaattgatatattgagataataatggatgtaatcttccaccaaatttataatttttctccattttgtaagataactttctgtcaatttatatctcactccattaagtattgtttaattacatttttctatgtaagtttatgtctacatctatttctctttgtgtcgaattcttgataacaaactcttattcttatgagaacattcagggtttgtctcattatctttatattctgatttatttttagtttttattttcttcattttttctctcctttcaatttttttaatcttattttcttttcttttcctttttattttcaactttttcgtatctataattgagttcatctattatagatctcaattaatttgtgttaaagacgatgttgatgatgataattaattgacacatgttgttcatcttacacagaatgtgataccactatggaaggaattagagtattacaaggagtatcaagcgaaattgagagcccatgttggttaagaaaaagccaatgagatcataagcgaagcgttgtacttgatgagcttgggaaccaacgatttcctaggcctcgaaaactattatgtattcccaacccgaagacttcacttcactgtgtcacaatatgaggactttctattgcgtattgcggagaatgtcgttagggaattgtacgcacttggagtttggaaattatccataactggtcttgtaattcccatagggtgtctccccttagagagggccacgaacatcttaggcgaccatggttgcaacgaggaatacaacaacgtggctatgagcttcaataagaagttggagaaagtgataacgaagcttaatagggagcttccacaattgaaggcgttgtcatcaaatgcatattccatcgtcagtgatatcattacaaaaccttccacatatgctacgtaggctatctaatttatttgctctaacttttgttgttcttttaacttctatatgcactatatatcttcaaggttttaaatattggttacagtcatattaaggtttcttcatatttattgatattgtgatacattacgaacaaatataacttatgcgattcaaattactatcgtggacagttaaaacaatcttaatattgtagcccaattaatcacgattgcaaactgtattttctttttaattattttttttattgcgtagtagattttaaattaatgaaatttgcgcatcatacatgtgatgtgctttaacttccgtatctaacctgtgggaataatattataaagtactgcagttaattgcataattaatgcatgtaccaaacaacggggtgcccttctcctgattgaaatcaaaacggtatgcttgctgcagatgttctccttcttcaaactccgtttcttttttttaaggcaaaatatatattaatagatagaaaatgtacatcaacctgtataagttgtacagtatgaactctacataccaaaagatatccccatatacagacccaacaaaccaatcatcaaactcttctccactattatccagacaaaagaaaaggtataggctaactacaaaaaactgatagacactgtatggggctgttgcacccagaagagaaaaacaagcctggtttgtttcccttgaaactttgttttgactctcttcaaacaaaactaaaaacttgtttttgtagttttaatataatatatatttttaatgatttattattattatttatttgattactaactttaagatactaactaatactacttatcttctcttcaaaaaaactaacacttatcttgatattatttaaaggacctgatatgtaacaatagatggttttaaaggtgatatttaatacatttaattaattgatttaaactatttaaaacagtactattacttatattgatactaatatacatacgccttattaatttgggaaattgaactttatgctggtacaattttcagattattattattattattattattattattattgttattattattattatatatactattaattagatatatcacactaacaaataaattgatatttttttttgaaagatcaaacatgttattaaaaatttaaaataaagtgtaatattaaaggaggtaaaaattataatttattaaagcatatattgagagtaaaagtcaaaaagcaatagtaataaactataagttaataagctgcttcatctaaaaaatattataaattaacgagataagttcatctattaaacacttctattatggtcaaagaaacttataaattggtaataaaaaaaattacaaagtacacaggcatcttgaaggatagccaacagaaatagggttgttgttttttagttcgtatgcattcaattaggaaatacaagaaatgttatgcatgaagaggacagctgaaacataacatttaatttccgataaaggtttggttcaattgataaagaaaagatcgatccatgatccataactcataaacatgaaattttattgttgatgtagaaactttattagtaaataatacataagtatttctaaaatcattctttgaaacttgagactttttataactctaatgagttctagctaggactcatttaattacctaaaattttgttaaatagaaaaagaaaaaaaaaacataacatttagttctaaattaatttgtatggccaccgaagctcgcgtgtagtacacaacttttaggtttgcttttacttcttatcataaatactaatttatgaaggtagagaaaagctccaacacacaaaggttcagtgtggtacatcaaccaaccagaataggtggattctcattctttatggatctcattgcatttccaaattcaaatttatgattaataaatcatcaagacataattttattatgtgtcaagactcatcctcatatatatatatatatatatatatatatatatatatataaactctttattgactaataaaaaaacatcaaccaaccaaaatggtagttaattttgtatccagagttcacacaagatttattaacaaagttatgcaagcatatattttgttttcaagagaaaataaaatatgcattgacaatataaaatattgttgctcgttcagtttatatgaatttcttgatttattaccacaaaaacctacataaaatattgaccttgatatggatattattaatttcaggatttgaggttgtagctagagaaggcgtgttgttcgacgggaacatttgaaatgagctacttgtgcagtgacaagaatccacttacatgcacagacgccgaaaagtacgtgatttgggatgcctttcatcctacggagaagacaaaccgcattgtctcaaaattatttgattccaaagcttttagcaacctttagatgatgatgatgatccattattttccatttaaaagattacatagtcttgcctagggcgacatcaaaatatacatatagcgagatttaatgtcgggttgccatgcttgatttgtatacttttttgtgtgttcaattgttataacaaataaattaacacctgatcatcatgtagtcatgtacaccatatttgacctttgtaccttctcatgttatactgtccttgggtttttgcttcgctgattcttgtatggctttgccaacttttgatgtttggcttttttcttttttatatacgcggactgtaatgttgtattttattaattgattgttcaattaatttaattaaattatatataagagaaatttaatttaagtacttgaatgaattagttaataaatttggtgatttgatttcatgtatatatatggttaatgagtttttagcgttttggacttaagataatgaatttttattatgtttagagagacgagtatgtatagtaagactttggtgtgaaaataaaaaattacaagaatcataaactctcctttaattctcaaaaatttgaaataaacacaaaaattctcattctactctcttctttctctccaataaaactcattcctttaagagttgagaacttgattgtcttactcaaatgatgtatttttctcctctatttagtgttcattggttgcccttttgcgtgggaaacacctcactttcctattttatatttgattttcgattttcgattttccctagaacacttatggggattccatgaaaaaggcttagtttttggatttgaatatgactttgggtttgttttgagtatggataatgtccttgtagtttgaattgctaatggagttgaagaaagttttatccttggatccaaagttccgtccttacttctttttcttcatctcaaagcaagttcctttggttttatagataatggaagctttatcctttttctatggttaggttgcattggattgctttaaatgttgtttgagaattaaccatgtttaaaaatgaaggtttgagcttttgaggtttgaaattgaggtttttcatttttcaatgaatattgatgaaaagttcatatttgtaaagagttttaatgttgtttatgtattagaattgatataaaaatgtttgttttagaaagatttgaaaatcataagagacaatgcaacaaaatttcaaaattttgcaaaattcgcatctactgatcaatttcgtgtccactgaccaattttgagtttaatgaccaatttcgcatccaatgaccatttttaagtccaatatatagttttgagtccaatgacttgttttgagtccaataactaattttcagtccagtgaccagttttgagttcagtgactaattttaaatccaatgaccatttttaagtgcagtaactaattttgaggtcaatgatcaattttgagtccaatgaccagttttgaagtggatgtgattaatgtttgtttttcttgtgtaaattaattattttgagatcttaatgaatttatgatgatatgagatatggttgagatgatgttgttttattattagagttgactttatgttgagatcatgagatttacattcatatgagtttttggtgagttatatgcaagaattcaaggtgttgacatgtcttgttatgcttattgaactatatatggggttcacgagtatgatgaacatataaatggtgaatttgtgatattataacctcttatggtgttgagattggtgaatgaatttgtgattacgtatgatattgacttgaatgatcataacatgcttgcattgatgaatgacattacatgtaagtaggcacataagttgggggtgctaagagggcccttaacctcgtgttggaggttgtcgtggtggctgacatcgaatgagcatgtagaatggatgagtaagcaatccctaaataggttaaggtctttgcaagttttgctgaggtaaaccactacctatgctcattcattttcgataaaatcagacttcctcctcaagattaattcaattttccccgaatggtcagatcatagagtgcgactctgttaagggatgtacttggattaatcgctcaaaaggtgaaatcttccaggagtaaagagtcagcatgatataacatgataagtagtcatgtgcactgataattgtgtctgaagaatgacgtgttacttgaatagatgtattagtacatggttgttggaaaaacgaaggatttctgcatacctttaacatgatcttatatttctcttatatgttgttttcttttaaaatgagtttatctttacattttctattgaactataatgatacacaagagcatattatgatataacttctgagaaacatgttactcgtggttgatatggacttagggacgagatccaacccttggtctttttgttatgttttgtcttagtgaaaatcaacttaggatttatatatatatatatatatatatatatatatatatgttgtatttattcccttaatgagacctttgagatttgtttataatattttgatgatgtaatgccttgggacacaatacttttatgttttatgaattgaggatctttttatggatgaaatttatgacatgcttgtatttatgaaaaatattatacgtattaattaaattaattcgagaattttaaagggagcatgtaataacatttgaagtcgttacatggataatataattagtgggaagtaattaagaaaaaactaattagaaagaactttacaaagaaagtagtaataagttttatgattttattactattgtttaataaatgtaatttgagttgatttgtttataaaatgttgaataatttaccttttgagcattaaattataacaaattttatgagaatgtacgcaatataacatttgataatataagtttctgtttttttatgggcaaattaattatactacgagagtagaagggggtattacaatcttaatataaaagaacttatccagaaaagggaaaaccagggtgaacctaacatattagggatatttgtacactaacgagagaaaaaatgttacccaatttaccaaaaaaatcatgaccatatgatctgacctatattaattagatccaaaagcgtaaaaatgttgaaggcaaccaaagagttcaaataactgcatgttgtatttgtcaagctttgttttgcacttcttcctaaaaacaatctaaagaatttacaccccaatcaggggaaaaaagtgtctcacccaatatagtgatgtacaagaaaaccaagaccaagatctaattaaccactattagatccaaaagccaaagaatggaatcatgcctaaaaatgatagcgtatgggaaatatatagtattcataaatatttgaagaaagtgtaaccttaattaattaacgctcgaccatgagaatacagcagacaaaacttcatgaaacaaagtacatgttagcatgatgagattgatgtgtaatacttcactatgaaaggcaaaaaaacataaaacgatcgatcctgctagacaaccataacattccttttgagtaaattacttctggttagaatttgattccaaataatttgccaagagaaagctaagactctagagaaggggcatagcattccaaaactttctaaataaggtcaactcagaattagaaaaaaaagttgaataagtatgaaaagctatttcgcaaccacatatgtgcatatttagatgaaaaattcccacagatttccaaagaccacacccacatgtcatacttatccctagctaggaccgcatacctcaatatgtcaagcaatgcagacatcaagatttcctcctaaaagaatagagacctcctccaactaaacaaccaaacccaatattcaacaaaccacacctcccaaaatccttgaacttgattaccctgcacctaaaagtggaaatacgatacaatctagggaatagatcttcgaagctatcatttcccaatcaaatatcttcttagaatctaacatatataggtaccacaaccagtccttttccaaacaagaggaaaaccaaccaaaagaaatttcatgactgttcagcttggatatatacatatatcccaccatcaaagggaggaatattcacaattaaaacttctgacaaaatttgtcaaactggcattaaaatgacccatacctagaacaaagaatatttatctaaaaaaccatctgattcagacagcaaccaccaccgccattttgctaagtggtgtaactttaaccattccttggacttaaaaatcactttccaactaactcaagcaaactttcttttatcttcaatagtcactaccaccaaaaatcgagtcaaaatatttaaaaccttccttggcatggtagtagaagttacaggctactcaacacagaattcataaaacttaatatagctacctcaaaagagagacgtttacttttccaagatcccaacttctaccccaaattaagaatgaatatcaggcttccaatttgctaaagtcttaggattagcaccaattgaaaggcctagatacttactttaaaggagtactactacctaaccatcatcctcattcatatgcaattaaactacttttatataaagttaattttaaggatataaagctggctcaaagcacctcaaaaatagaaatctacctgagacatttatatgtaatttccctttaacatctcagtagtcatacatagggttacattacttttgagtaaaaaagtttgatccacgtgatggaaatggcagtagggatagtgcgcaccccagacaagacccatttaatatttcgcagccccaaagttcaaaacaggtacaattacaacttaactcttggtttgaggcccaattaggaaaatgcaatttttttgcttcctgcacccccccaaaaatacccagtcaaacaaaaataccctcatcaggcacccctgcctctcccaagcaaatcctagccatcaaacctccataatcaccgcatcccacctccaaccaagtgaccaaccacccaatagtatactaccgccgcaccctaacaccaccactacaaccacccaacaccaccacacccaccttcacccaacacgaccgccaatcccaactccttctacaagaccaacccaagatgtattgtcaaagttagcattgtcgacgttgcaatgaagaaggaaccaagtagcactggcccttctttgttcacacttctaatgttgtgtccttctgacctttcaccctaataggtttgctacactctgaaccctcataattggcctcaaacatggctcgctaaccaatattttgtcaccctattctgaaataggtttctggattacacactttcaaaatgaccattctcttataaaagaagggtaatgtgggaattttaaaacatttgggatacaagaagcaattgcgggcaaaaagtagctattagccgtacaaaaatgtagcaacataaacataatttattataagaagaaaataaattatatcggtataactttgacaactataatactattatataattttcaactgaataatattttcttaaaatttatcatttgattgaaagtttatttcatataaatcatatattcaaaatttcatattaatccaaaatcatttgatacctcgttcatataaattaaaatcgacgtaatataaacatttcaaaatatactaaatatggatcatttgattaccttcttattattttttaattttgacaaaaaaatgatcttaataatatgtcgatataattcaatgattgaatcaataaaaattatattatatatcaagttataacaatagtataatagttgtcaaaattatattaatgtagtttcatctctcttcatttattatataataatgtaaaaaatatttgctctattannnnnnnnnnnnnnnnnnnnnnnnnnnnnnnnnnnnnnnnnnnnnnnnnnnnnnnnnnnnnnnnnnnnnnnnnnnnnnnnnnnnnnnnnnnnnnnnnnnnnnnnnnnnnnnnnnnnnnnnnnnnnnnnnnnnnnnnnnnnnnnnnnnnnnnnnnnnnnnnnnnnnnnnnnnnnnnnnnnnnnnnnnnnnnnnnnnnnnnnnnnnnnnnnnnnnnnnnnnnnnnnnnnnnnnnnnnnnnnnnnnnnnnnnnnnnnnnnnnnnnnnnnnnnnnnnnnnnnnnnnnnnnnnnnnnnnnnnnnnnnnnnnnnnnnnnnnnnnnnnnnnnnnnnnnnnnnnnnnnnnnnnnnnnnnnnnnnnnnnnnnnnnnnnnnnnnnnnnnnnnnnnnnnnnnnnnnnnnnnnnnnnnnnnnnnnnnnnnnnnnnnnnnnnnnnnnnnnnnnnnnnnnnnnnnnnnnnnnnnnnnnnnnnnnnnnnnnnnnnnnnnnnnnnnnnnnnnnnnnnnnnnnnnnnnnnnnnnnnnnnnnnnnnnnnnnnnnnnnnnnnnnnnnnnnnnnnnnnnnnnnnnnnnnnnnnnnnnnnnnnnnnnnnnnnnnnnnnnnnnnnnnnnnnnnnnnnnnnnnnnnnnnnnnnnnnnnnnnnnnnnnnnnnnnnnnnnnnnnnnnnnnnnnnnnnnnnnnnnnnnnnnnnnnnnnnnnnnnnnnnnnnnnnnnnnnnnnnnnnnnnnnnnnnnnnnnnnnnnnnnnnnnnnnnnnnnnnnnnnnnnnnnnnnnnnnnnnnnnnnnnnnnnnnnnnnnnnnnnnnnnnnnnnnnnnnnnnnnnnnnnnnnnnnnnnnnnnnnnnnnnnnnnnnnnnnnnnnnnnnnnnnnnnnnnnnnnnnnnnnnnnnnnnnnnnnnnnnnnnnnnnnnnnnnnnnnnnnnnnnnnnnnnnnnnnnnnnnnnnnnnnnnnnnnnnnnnnnnnnnnnnnnnnnnnnnnnnnnnnnnnnnnnnnnnnnnnnnnnnnnnnnnnnnnnnnnnnnnnnnnnnnnnnnnnnnnnnnnnnnnnnnnnnnnnnnnnnnnnnnnnnnnnnnnnnnnnnnnnnnnnnnnnnnnnnnnnnnnnnnnnnnnnnnnnnnnnnnnnnnnnnnnnnnnnnnnnnnnnnnnnnnnnnnnnnnnnnnnnnnnnnnnnnnnnnnnnnnnnnnnnnnnnnnnnnnnnnnnnnnnnnnnnnnnnnnnnnnnnnnnnnnnnnnnnnnnnnnnnnnnnnnnnnnnnnnnnnnnnnnnnnnnnnntatgagtgacttatttatctcttttttttttcaaatgttaaattaattttgaggtgcttatactgtttggcgattttgaaaattctgaatattttaaaaatttgtgattgaatgtcagaatatttttaacgtgcatgttatcgaaaaaaaaaaaaaaagagaattgtttaaggtgctctaactcttaattttccaaaaaaaattcccgcgattaactcttttgatttccaatagtatgctaccaatgcaaagcaattcggaatcttgtacaagatatattaaacattttacagaaagctatttgaaagagacatgagccaatacaagaacccaccctttaccaactaaccatataatctttttcatcaaaacaactatatatatataacacaagtatttaagcgagttctcatttgaaagttctgcataatcccccaaaagaaaaagcacattactcctttaatatttgagtcctataaaagttagtccactaaatttaaaaatgtgtaaaataatatacttaatatttatgaacaatataaaataaaccttccattgcagaaattattaaataatagttaatagataaaaaaatacctttacatatgtaaaggtgtatattcttccacctgttcttttaactttggttcctgcaatagtaagtaaatgcttcacatgcaatcataaataagtttgctttttttataagttaacgagaatttcatcataaatccttagtcaataactcactgctaataaaaatttagaagaatagagagataagttgtaatgtcaagtaaaagtacattatattttgtaataatgtggattaaaaacaaaaattattatatttaccagtcctgaaagattaaaaataaaattccttatatttacatggcccctcaatcatataaatttaaagagagaaaataaaaaacaatgtattctaatggctcaaaagtcaacagcaatccccgaagtgtccctatttttgtcttctaaaaggctaaaacaaagctatagtttagaattatgacaacggtaaacatatatagcaccttctattagtaaggtagggtccgtactgtttggccattcaagtaaaaatataatgtgagatttgaactatatgttaataaactagtgcatctaccagacaattattcatacgatacgtactggtttacaaattgaggatgcttgattcagatccctgatccctctatggagattaatgttttcagcttaataagaatcattacttacaatcattatttaggatagcatttttttgtgtgaatattaaagataaaatttaattaggatatttgatatcatgaagattttttgtatatgataatttaattgataattattatgtatgataaatttattagctaatttttataataattattttaaaaattatatttaagattatttttaattgattagcaatgaaaaaaaaatagatgacttttacagttatatataatactatatatgaaaattaaactcttaaataaaatcctaattttaccctgcaaattatcaaggacttctctctatcagtattatcgagaatcaaattatcgatagaaaaagtccactgtaaatcattgaaaattcaaatcattcctcattcttttctatatatctattttaccaccaatggccaaataactaacgagaaagtccactgtaaatgaaagtggcattgatgaaatcatgtgtaaatgcatcatgtaattgtttgtacatgtacacgtaatatattcatgaattaatttattaactgtggtcactcatgagaatatatatagttagctagagattgaggaaaagattgttatgcataattcctgcgtacgtactggtacctgagttatgcatgatttatgatacacactattagtggtttcttttgtgaaaagagagagaaaagtctcatttattgagcaatggatacataaatcgtgtcacctcctttctcgttgagtagcattgaattaatggaataggccaagagcagatcaggaactaacttgtcccttcagcggttgcaactacacatggctacctaattaataaggccgtcgcgtctctgtctctttctcttactattccagctctttcggtggtagttggtgctggaattagtcaaacctgcatttgtaatatggaatgtgagattccaacaatgtttattgtaatattgaattaaatcaagccattttttattatgagctggatttttcttggtctaacctagtccttgatgtgtcgtggactagtcaattttttaatatataaaaataaaaattatcaaaataaattaacttctatgtataaaagaagttaatgagatatatataattataaagagttcaagatcatttttaaaagagacaacaaggaaaaaaagtaattaaaacccaatctcatttacgttgggctcaagaaacttacaaggaatccacccatttttttcataaaaaaaaaaacttatacatagttataagtaattaaaacacatgttgagttattaattactttttaatttaaataatatccacaaattaataagcaacacgaatgaaaaatctataagatatttaaaaaatacaaaagtttaaaatttttctttgtcaagagagttatagaaaatataaggttgacttgataatagagataaaagaagaaagagataggtcataaattcaaatcctctactaataaaaattaataaattaaaaaaatataatatctaattacaaatagttgccgagttttctgatatatcatgaacttgaaattaacaagaaaaaactcttgtcacgtgaaagttttatagaaggatatgaaaatgtggtgattgcggtctcgtgcagctactaccagatatgtagttaaaagacatccaatcgaaaagaactgcttttactagatttagtcggtagatgatatatgcttcaaatttattaatatacgaatttggttgaatgtaattcatcaatatccacaagatcagttcatgcaatggaagcagtacaacttgaactcacgaacttatttatggttttgcacggtgagtcatatatatatgttcagctttacaccaattcagaatgaatctcctttgcaagaaggtactccctctttctgacaagctaggtgtgacacaatctagaaggatggccacaaagaagaaaaaatttaataaattttgatatatatgacaaataattcagtttaattctcttctccttggaccttgggggatagtttttgaagacattaactattatttcttgatttaggcaatgttttatcacgctaaatgttggacgttcgggaccataaaaatgtataatactcattgcgacatccataatattcttcttaaacgatctatgtagtactttgtattccaagaatgtttttcattacactaagatcttctatgacaaatatttgctcaatgttttgttgagaacaagtgacttcatttttagtatgagcatggactcaccatttttatagattttcacaaaagtagtggcttgcgaaagtcttctaaaagttatgttagaccataaaaagctcgaaatttttgtaccattattttagagcttgcttcatatatactataaaagttttactgcaaataacacactaaaggctcatggtctgatactatgaaaccttcaagttgctctatatataaagataaatatagtgtcttcattaaaattttgggataaatacttatatataatttacttgtgccccgatctagatcttcaaatattttagctctatcgatcatacttctctaacaaattgtgacatgtatattgtatgtaagtgaactctttgtaaattttgtacgtttggtggttatcctcgtgcatctagtttaggtagtacaattatcccctatccagcctccagcaggctggcacttgtgttctattctttgcggattttaagactttttcgtgtgaattgaacgtaagtcttgtacatggtgtcatgagagaaatataaatacattgtagggtctagcagaaatttgtaagatctcatttaatatgtttgtatttatttttccactcacatgaattcatcacgtaaaatcccctattataagatttaatttatgatatacattgcacaagtccatcttttctcaggggtcgacattcacatgacacgcgtcatatttaggattggttggtatttagcttttttttcttaatttatttgttaatgtctattattaaattatattgtgtattattttcgcctgtttttttatttttttgaagaatttactttctaaaaaaaatattctcaatttcttgtataaatttttaaatgaaaaaaaaagtaattttttgtttatcataaaaaatctagataaattgaatcttgataatttatcagaatcaaaataggtctcaagattcaataaatacttagacgatagttataaattatttatcaataaaatttttactgagaaaaatatattatttatcaactggaataacctttattgaaaaaatattttcttttatgttatacattcaaaaaaagaaatgtaaacaaccatttaccccactttgaatgctcgtcccatccatagaactgttatcttgtcttggcaattatggtttccaacaacttcttcacccaaacaccaaaagatcaaagttccattaatagtcctaaccaatatttattttctcacaagttcacttccctagcacactccaaattcaccctacaacaacgacacacacacccctcacacaataatggaagaagggcaaagaaaaacaacactacttctatgctcccacattgtggttcttcttttactctccctagtggccgagactagtgccaaggtttcagcggtgatcgtcttcggcgactcctccgtcgacgccggcaacaacaacttcatccccaccattgcacggagcaattttcagccatatgggcgtgactttgaaggtggaatagccactggaaggttttgcaatgggagaataccaacggattttatatcagagtcttttgggctgaaaccttatgtgccagcatacttggatcctaagtataatatttcagattttgcaagtggggtcacttttgcttctgcagcaactggttatgataatgcaacctcagatgtgctggtaattcatgtctttttcaagctatatatataatggaactatatatgcatgctttactttttcaataatatctctattttttttttcttggctgatatattgccagtcttactatttttgaaagaaaaaaaaattctatacactccattttccttaaaatgttagtcatatctttcatttttctttatatatatatatatatatatatatatatatgtatgtgtatgtatgtatcacataatatcatctttcatatttatgtttttttctctgtcagtaaaatgatctttagatctctatttagaaaataatattttttttgctttcaataaatgagcaaaacatagacacatatagttttttttaagagacatataaaattaattcaaattacttatttttttcccttgttttgcttcaaaggaaaaggaaaagaaagagagatagataaaaaaattaaaattaaaattaaaacataaagaaacttttagtctttttagagatcaactttgtnnnnnnnnnnnnnnnnnnnnnnnnnnnnnnnnnnnnnnnnnnnnnnnnnnnnnnnnnnnnnnnnnnnnnnnnnnnnnnnnnnnnnnnnnnnnnnnnnnnnnnnnnnnnnnnnnnnnnnnnnnnnnnnnnnnnnnnnnnnnnnnnnnnnnnnnnnnnnnnnnnnnnnnnnnnnnnnnnnnnnnnnnnnnnnnnnnnnnnnnnnnnnnnnnnnnnnnnnnnnnnnnnnnnnnnnnnnnnnnnnnnnnnnnnnnnnnnnnnnnnnnnnnnnnnnnnnnnnnnnnnnnnnnnnnnnnnnnnnnnnnnnnnnnnnnnnnnnnnnnnnnnnnnnnnnnnnnnnnnnnnnnnnnnnnnnnnnnnnnnnnnnnnnnnnnnnnnnnnnnnnnnnnnnnnnnnnnnnnnnnnnnnnnnnnnnnnnnnnnnnnnnnnnnnnnnnnnnnnnnnnnnnnnnnnnnnnnnnnnnnnnnnnnnnnnnnnnnnnnnnnnnnnnnnnnnnnnnnnnnnnnnnnnnnnnnnnnnnnnnnnnnnnnnnnnnnnnnnnnnnnnnnnnnnnnnnnnnnnnnnnnnnnnnnnnnnnnnnnnnnnnnnnnnnnnnnnnnnnnnnnnnnnnnnnnnnnnnnnnnnnnnnnnnnnnnnnnnnnnnnnnnnnnnnnnnnnnnnnnnnnnnnnnnnnnnnnnnnnnnnnnnnnnnnacctatttttttttctcttctctcgtccaaatatttcacaattttttatgatgtcattttttatgaaacacctctctttaagatttgaattcaatcttattaattatatttatttcactcttttaagataagaatatatattttacatgataaaagtataattataattattaattaaataataataataataactaaatttatgactaaatacatataattaatgtaaattatttaaatttaagaatgaattctaataaaaagtaattttgagcaaaattaatctaaaaaaatgtcactttcaaaagaatatatttaaatttgatatacaaggctgtacatatgtagggttacatcacattattttttctaaatcatttcagctaatctccgcactgctacttcctctttgcctctcctctgtttctcttctcttctctgtcaaacaaataggaaaaactaaaatctcctctttatttttttcattatttttttttttgttaaaatctgaaatttaaaaatgaagcttatgagtccattgtccaagaataattatgcaaaccataatattggttgcagtctgtgataccactatggaagcaattagagtactacaagggataccaaaagaatttgagtgcatatcttggtgaaagcaaggcaaaggagaccatagctgaagcattacacctcatgagtcttggaacaaatgacttcctagagaactactacaccatgcctggtagagcatctcaatacacaccccaacagtaccaaatttttctggctggcatagctgagaacttcataaggagcctctatggtcttggtgctaggaagatttccctaggagggttacctcccatgggatgcttgccacttgaaagaaccacaaatattgttggtgggaatgactgtgttgccagatacaataacatagcattggagttcaatgataggctcaagaatttgaccattaagctaaaccaagagctccctggactcaaattggtgttttctaatccttattacattatgttgagtatcataaaaagacctcaactttatggtatgttatcctaaaccatgcatatatgtttttcagatatcattgtctctttcccccttttctcccccttttctgtttcagataatttggaccctcctcccaaataaaatattaaaaaaattcactattcccccttacaattttccactgtttcgttcttgattttatatattgtttctatctttagtaacaacaataataaaatcaataatatatagaataaattaaatatgcattgacaatctaaattttttatattgtcatctaattataaattatcatgtataataaatttgttgatttttaaataattatcttaaaatttatatcaacaatttctaattagttaatgtacccatctcttaatattttatataaatcaatcatgatgtgcactaatttattattttttttctcttcaggatttgaatcgacctcagtggcatgttgtgctactggaatgtttgagatgggttatgcatgcagcagaggccgaatgttcagttgcacagatgcttcaaaatatgtgttttgggactctttccatccaactgagatgacaaatagtatcgttgcaaagtacgtggtgctgcgtgttttatatcaattcttacaataaacaaataactactagtgaaattttatttatgtactggtatctcttcatgtttgcacattcgccataaagtgccattcgggctttctatgaatgactgcatgtcgatgtgtacatatataaaaatatcaatacagcacattcaccatataatgtgctgataattagaaataagtcgttttgtttagaacaatatatatagtatttatactttttaggcactttactagagtcggtgtcctccatgtatgttttccttcacatatatatgtcctattatgttgggtctatagtttgtaatatctatccatggtttggaaatgtcaaatcccaaaagggagaattttctgatttttctttggttgcaattatttatgggcaaaatcaaatacctacttcattgccaaattcacttttcagaaattatctaaacctaattaatcaatttaccataaatccactagagtcgaccaagtggtttgaagttgaaatagaatgaatgagatcataagttcaaatcttagtgcaactacaactatacaccaaaaaagtcaatttaacatgaacttattcaaattaataaattcatccaaactccgtttcacaaattagctgaatgataacaccatattaactctttattaatcattatcagtatcttaataattagacaccatttctagggcatctaccgcttttgaaatgtaaatgttctttaaaaaccaaaacggtacatgaacatttcctcaaagtcacaatcacttgtaaattgtaattgtcaagtttattatgatgtcatgaaacttctgacttttgagaaagtacattagtacaaccaacacctaactatgaaactaataaagccaatttttgcactttcataagtcagtcatattcatgcttgagcaaactgccaaaactagataattccaacatattgggaaaaatccaagtcccacattgactaaagataattttatttatgatatccttctcattgttcattgcaacttcagcgtcaacattagctgtttgtaagcatactgttgctagttcgaacctcagacactagtagctttacctcttgttgaccagatattatgatctgtagaagttttctccattggttttacatatcagatattgtaggcaaatatgatgttttagttccaaaaggatcactttggattccaatagtttactcttttgatgggctcttcctttcttcctcgcaacataaagaaaccatgtcttccaggcaaggtaccaagggaatctcctatttcagagttagttttacattctcatcaaggaataaagcactggcaccaaaatttaagagagctgatattaaaatttatcttaatccatcccagtagaggaatctatctaactaggcaaggagcatgttctagagttgagtctatacagaagacaaatacacaagttacttccatttggatgaagctccaaaattctaaacaccatctcctagttatgattctcattgttacagactttggagttcttgttttctctaaatcaaccaaactgtagagaggtcaactgagtagtctttccttgaaaaaagccatattatctagatgttatccagattatcctccagtgttgttctggttaaatcccaactgtctatacttccagcgcccccaaagtcctacaagcaatggacagtgttttcagaacagtgatgtaggacatgatgcagatgtagcaataccccaggtcattcattggtagcgctgcatgacaaaccagccagataaggtgttaacaaattttctggaattttaaagctccaaatccaactcaatataaaagtgcatagagttccatgtgtgtgcatgtgcaactgttgaaatttataataaaaatatggtatttcaaaattactgataaagtggtatgcatacagtttacaatcaggtttagaggcaaatgattgaaagggaaattcaataaaatagacctaagttgtttcaattattacaaatcttacaatagcaaaaagaacattttggcaagccttgaggcttaaaatagaagcatgttatatgaaacattctaatcaattaaaataacaaattaacaataagagattaataagtaaactaactattaaaaatatttaaaattataacatagaacatggccacagaagtaaaacaaaacgtaacatctatctcacccaaaaatatgaacagagcaacatagcatagaacataagccaaatttttttcaaggtaatgaggttttcaacaaaatcctaatcaaaagcattgattgcttgcaggataccatttgattaaagtcaagaaacgataaaaagaaatgcatgatagaaaaacaggataatacaatgtgtgaaaacatgggaggatctgagtagaagaagtaaactgaacaaaggtaaaaaatgaataccttaaatggagctattagttcttatctttatttgataacctttttaaacccttccagatggctggaccttgaggatgcacattcacaaagtactttacaaagcgtttatcattggatgcaattatggtactcagggttaatgtaggatttactgcattcctctcctttagccacgcatacattgaaagtctttcaacaattttgtccaaatcatggcaaaaatatgttgggaatcccacgagacattctagagggtaatctaaaacatttcttaagaaatcaatcttcttttgaattacagctttgttctggcttagaatcataggagctcgttttatcatttcaatcacactgttatagtccaaaccagcttctaccaggcaatcaaacctctcttgtaattgatcacctctccctcgaaacatttttaacgctttggccatctcttcagagttctctgtgtatcccaatttcagcaagaaagttgtcttttccaaataattacgtgggtcatgactatctacctttccattgcccttctgctcctgttttgatgccaaactaattagcttcaatggatcatcctttatgatttggcacaaatcagcttttccaacttttaactcctgacaaacagttttatgacctttaaaggaacgtgtaatcaggagatgcatgtacttagacaaaatatgtgtaatgtcatcttttcccattccaatagcacacaaaaagtctatcactctcaacatatctttcgcacacttattcaacaagatattgggatactctacaaaataagaataaatcacattcatctcaacaccaactttaagcaatctaccaaaaactaagtacactttcctcccaaaaccctccaacaacaacttaggattttccctaaacaaattgtgcatttgttcctcggaataacccactttatgaagaaacagcatggcatcaagcattcttttccaagtatatgtccttgaacaagacaagtaattcaccatccaatcactctcaatcccaattctcttcaaccaatcaagcacagcaacaaattcaaaattcacatcaccaaccaaaagcaaagggcaacaaacaacaagcttgacaacagttgatttactcaaacccaaattctcataagcttctaactttgacaacaccaccccactagcacacccaaaaatctcttttgcctctttaaaaaacttccccattcgattccttggcaccccatagttacacaaagcatgaaaattttcaagcagcacatgatcatccgccaggaaaaacatgccatgcggaagaaacaaatacaactcagaggggtcaattcccaaactctcgaaaaacggttcaaactcgttaatggggttgtacctgaggaatcttttcaacgatcgaagaacatcatctttgtcgtcaatcattgagaccaacgattcaataaaacgtggtgagttcttgctgatgtactcggcgtcggagaaagtgtagccccgcgtggaatgcatgtaatccattagagcgtgttgagcttcggacctcaagaggcgagagacacgtttgggggaacgtgacgagagaacggaacttaacggagaagaagagggaagagggatgggttcagaagcgcgaaagcatcgaactttgagagaaatggaagatgggtttttttgtgaaaggggttttggaagcatggcgtggtgggaaaaatagaagccatttaaattcaactgggaaatcatttgagagagataataaaagaatgaagaagactgcaagtgtatataagcatgaaatgaaattagggcgttcggtcaaattcggtttggtaggagtccaatgtaattttgtgttttaaaacaaattataaaatatatttttccttcatcctatttagtctcttttttttcttgtaactttttttttttagtttttataaatgtatttgttttttcatctataaaatgctttggataaagttttgagtgttttgatatctaaaccattttaaggataaaaaaacaaaataaacatatttagaatgtttaaaacaaaaaatactaaattataagaatgagaaaaatattataaaaaaatggcaatgcattgcatttcatcacagtgctccaggtttttgctaactcttcttaaaatattatgtccagttttgttcctaagaaaaaaactgcacacattgattttatgacattgccttctatacttcactgaatgttaccatgtaataagatgcttgaacacatcatacaaaatacttgaagcatgtgatgcagtgtgtccctcaaaagttaagaggacctaacttcaacattggcagaattgaagcttgaatcagaagatcatgatataggaaaggaaagatacaaggggataagaagcaatatcaattaattaagtacgtgttaagcatcggaatagaatgggaaagagaagcaaaagcttggaggtttcgtaatgagatgcaatgtcgtgaagttcatgtttggttgtagtttaaaatgtagcggcgcagtgttgaaaatgagatagtataatgttttattattcactactaactagtaatgtattgatgtattatgtataaaaaaaatgtattggagttcgtctggatgtagtttaaaagatgttttaatatcttatctattagaaaaatgtattttttattttttaagagtgtctagttattatttttttagcttttcttttgggaatgtgttctataaattatgcttaaataataatgtttttaaaaaatttcaaaatgataaacattccctccatattttctaaaccctcaatatgtaagttttggttcctctctcttctcctcataagttttgtgtcttcctcgtttctctgttccttaaactctcttttgtttttcgatttctcttcatatcatcttcttcatctcttcttcttcggttgttaacataataggttaacaatttcttcattaattcatttttcttctcgttaaattttgaattattatgtattagaattatgattttgtttgtctcattaattattatgaattttgacctcttgaacatattcttgtggagattgtgaggtgttccctaaatattcttgaatgtttatcattgtttctagttcttaaacttgtgaaatgtctctcaatcaagttcttgtgaaaagaaagaaagcagaatggtgtgataaaaatattaagattctgctgaaagtgtacatagaagagttgaatgctagaaataaacctcacaaccacttcactaagcttgattggacaaatattttataaaaatttaataaagcaacaaatttgacatataaatataaacaattcagaaaataggtgggattctttaaaaaaggaatgacaattatggactaaatttattgggaaggacattggtctggctgggatggagagaagaaaattattgttgcttgtaatgaatggtgggaagctaaaatttaggtgtatattgaatctatagttatttctttataaaattatttttttagcacctttagaaaatgataggtatgtcttaggaccttggaccaggcttgttgtttatcaactcccaaacttttggtattgaagccaattgtgcttcttctgtattttctctttaatgaattatgctataattttttatgatatacaatgcttctgaatttaataattggaaagcaatattgtatttcatcatacaacttacaattatacaacttcgggaaatttctaaatgcctttgccaattgcattgttataaataattatttgttagaagttgccagcatctcttggtataagtatttttctttgaaaaagaaaattcttgaacgactggtttgatgtaatttattgtggtcgtttatatttaatttgtaggtcttgctatgtaatgccttaaaagacattctttttttatcgggaaagataatatatttatatacataaataaaatgtagagacaaaaccagaggtacttacacagatacatcacccttgccagagatttcataaccccgtcccatctatgtgcatgagcaaatggaaatacaacacggttgcaatatattaatgatgctggaacattaatagaaaacaaccacatacaaatgttctattccagtacccacacgcacagataaaaaaatgcccaccaataaaaactctttgtttaaatactaaacactacttgctctagacataaatctttgcattattaatagatatttcatatttctagctatgccaacattgcagactgtgataagaagaacctgtcaccatgcaggaaaataaaaacgaaaacttcatcaccaattgaccttccacaagatctggtcttcattcataatcctccaaaatacaggtccctgtgttcgagtgccattgtgcaaaagaaacagagaagcctctttccaatccctttatccactgccatgagtgatacagtgcttgatagacaatttcctctaaatatgatattgttcctattgctttttggaatacactagtgacattttgtaaattttattctagccagaagcaatatacaaaagggtcaattctgaacttatttaaggcacatctattgctttttgggcttatcttgaaatgctgctccactaaccggcccgggttgggtcataaagagtcacgcaaaactaaaactaaaagtccatccagtccaaacgttcccatctcgccaccgtgaacacccccacacattaacacactccaaacgcacgttagcaacctccgccgtcttcgccaccgcgcgatcgccgtcgatggagtctctcttcgactcgatcaacgtccgcgaccttctttcggcgcaggacctttcggaccctaactcccctctctcggcgccggatctccgtctcctgatccagcgcctggagtcgcagtccctccagatccgctctcaggtgcagtcctacctcgtctcgcaccgcgacgatttcgcgcgcctcttctccctctgcaacgacgccgtttcacagacgcgcgaggtctccgacgacgtcgccgccatcctccgactcctatccgaccgcccgatcgacgccgaggtgcgccacgtcgtatcggagataaaggcgaagaaggaggaactgaaagtgaagaaggaactgctgggattggttggaaccgttgtggcgctgaaccagagattggacagtgtgagggaagcgttgaagagtgggaggttcgaattcgcggcgcaagggttgaaggagttgaaggtggcgttgaggattggtgaggagaatgatagggagcctttggtgtatggcttgttgaggaaggagtggtctcagtactttgacgaggtgatactctgctctcttgttgctgttttttatggtttcgtttggtgcattaggtttatagttatgtgttaatgcgtggtggatttggtgctgttaatgtatttgtgtgtgtgccaattgaattgaagcctttcagaatgtgaaactgaaataggttttggtatgtggtgatttcaattgcattgacaatctgagtatgaaaggaatggaaatcagggttgatgtatgacaatgtgcgataaacaaatagtcaaatacaagatttcatggctctgtgcattattgttctttccatatttcccccaaataaaggccacgtactcagttgtatggaaacaaaatgctagtatccctgtggttaccattggcctaggaattcatttatgaagtttgaattcagccaagtttatgttacttggactattgtcaactaaacataatgatgataataatagttatataatgatgtctatggtgatgatatactgtgtaggggacacttaacgcgtttttttggttgaattatattttcattgatatatttgacaatataatcaattcatgtgatttgtgccatggtactgatggttgtatagtttgtgatttttatagtttgtgattgtttttagaggaattcgatttgggtttgtagattcaagaggtcctcatgaagtttatggaaaaagcagtacgatttgatggggatttgaatcaagttgaagtcaagtatcatttagaagttgagaatgtgaatgggattcaattacaaacagttgtggaggcaatggatgtgagttaattcattatattttatgctctctatttggaacactctattctattcctcttgtgctgttgtaaggttagaaattgatgagctccgttgaatttatttgttcttcctctaatttatgtccttttttaggtagttggtattctagagtatgggcttgctaaagttgctgatttgatgatcaagtatgtcattactccttttgtaaatcatggacaacctctttcatttcttgaggaattgcatcaagaatcggctgtactgaagatagttccatcaccagatagtaaggtgagtatgatatgttagggtcatagaatcaattgtattgctcatgctttgccattttatgacagagacacccgcctgcacctttggcggggaagggtgttgcttgcttgtgttattgatttattcatgaacagagttctcaattttctagtttagatttttttaataaattaggaagcattgtcatttaactgctattttatttctaaatatctgattttcattttgcagtttgaacatttggatggagagtttctctattcagggattctgctgtttatcaaatttatttacagaagtatttgcttccagaaaagttcttggatgcggtgttttggacggttgacatggccaaggatatcagagctaataatatctagctttctttcaaaggtttgctcttcagccatatgccattagaaacttgattgaacgaagaccatatccatgcatcctgtgctttgaaacaactctaaggatgtgtatctataaaaataccatttcattgatttcaattgatattggatcgaatgctattgttgccttataatatgcaagtgcatatgaattctaccatccctaccaacaaaaataagattattccaaatcttgtctatcttatgatctagaacaattatttagtggttagttatagtgtctgaaagccagagaggaagtgttgtgcgtatttgataatttgcagatagtcacttgagatgtctgatttcaggttgtcccaacagatgcatcaaaacttactgactttcggaagatcattgtatgttcatctgaatttgaaacggctttaaaagagcttatgtacatttcagcatcagatgacaaagataacaggctgagcaattttgctgaaaatgttgaggttcactttgctttcaagaaaaagacagagatcttggctaaagctagaaacctgcttctagaatgtgatttttcaattcctcaagtgagtttccagactgggaaaactcttcttttgctattgtgatctgtaattatttatgaagaatgtcactgcaggagtatacgagggatggtgctgtttggaagagtgatgaaacatctgtccagtcatccagccatgtggtagatttgcttttcttatcagagaggtgtctagtatccaaagcagccaaacaattgatggagctagttcatcagacactgcaggtataccatccagaataatgaaaatattttactaatgactctatgcagcacattttatttgaaataaaactctggactatctaaatactgtttcaatcagtagatatatgctagtttttaccaggtctatcacgatcgagttatttcctatagaggtcattctcattacggcctgtaacaattgctgtacagctgataaattgaaagaaaagtatacaaaatgataaactccggctccccagttagttgtaactaacatgttttagaatagttagaagagggatctagaattggtcccactgaaagcacctgtaaattgtatatagttaagggtgatgatggaatattatcataacaattagatatcagccgaaagtctctaaccagatactttagtcagaggttcatagtattcttccagtagctcaaaactagggccccgctaacaatattattcacctcatatctattaacctgcaatgatgtcatctttcaatatagggattagacagttgatgacaaagtgtattctttgtttttcttttcttttactaatactgtaatgataattgtttgattattgaaccatattaatactcttaatttaattaacatccatttaagtattttcagtttattgacctacaagaattttaatattaatagtgaagctgatcattgcaaatgaaaatttgtccaggatgtttgcctgtcatctacaagagttgctttggaattttatcacacagctagagatgctatactactttatgaagtagttgtccctgtcaaggttagtccatgtaaagcagtggccctacttagtatttctatcattatggattgattttatggggtgaatttaatacagtaatgcaagagtatggtcaatatcattattaattctagaatgatgtcctttgtgctaatatttaatacctttcctgatctttggctgagattacctattaactactataaatgacatccaatacatatggaggatttatcttctttatgatgttgttaacttgttgcatatgtcaggttaccactgtatttgggtgttagttgttgtctgtgtatactttcagcttatagtaataacttctgtttttgatttgtgaagctagagaggcagctcaatggcattaatcaagtagccgttctgttgcataatgactgtctttatctctcccaggagattcttgggtttgcatttgaggtatacatacttgaataactgaggatgaagtaaattcacaatatttaaataatttactattctttaagttttaaccaaaaataagttttttttaaaaaaaaaattctgatgtcatccttaacacattttattttaatgttaggttgtttttgtagtatttgattaaaacattactggggcccattcctcaaatgaaaaagtcaaggaaaacattcaatgtaaaccttgtttattttatgttagtatttttttttcttggctcatgcattatgctcttttctcagtatcgaacagactttccaagttccatgaaggaacatgctgtgtttgttgatttggctccaaggtttcagctgttagcagaagaaatattgcagagacaagttcaccttgttatttataatttgaaggaggtactttctttattaaaatgcttgaagcatctagcgatatcttactaatagttgacatttgccttactgacctgcactttcccacatgtgcccatgtttataggctatagatggtgctgatggatttcagaatactcatcagatgaaacaatttgagtcagctaaatttagcatagaccaggtaattttcttgtctgtataatatgtctacaataaattaccattttctatcccgtatttttttatgccttatttcctttattcctttttttttctctctgtatccaacccacagggtgggggagatttattacataggttactagtattagttgatgtatttttagtttcacaaatgacatgactgagtgtacttgattaggttgttttcattctggaaaaagtacatatcatatgggagccgcttttgctgccttcaacttacaggagaagcatgtgtacagtcttagagtcagttttctcaagaattgctagagatatacttctgttagatgacatagctgcagaggagactttacaggtagaatgtataccataagtcaactaattaatgcttgcagttgcaccattgtatttcattagttggtcttaagcattattcctctcatattttcagctacaaagacttatttatttaatgctggaaaacctgtcttcattatttgagtcttgggcccctggagaacagaatttgcatgagttccctgcagagtctcttgaagattttatcccatccttacgtaaaatccgtaaactatcaggcatgcagtggcatcttcttaattatttctttaaaagatgttggttggattatcgttgactcatccatgacagctaatctcttcatctttcatttgcctcagaattattagatatgcctttaaaatccattacagcatcttgggagaataaagaattgctctcttgtggctttacaataacggaggtattatttgattattgatgactttgtttcatgaccttcttgggacaatatttttttttccttcatttatgttaattatttttaaacactgcccttggattgttattttatgtcagcttcaattagacagtgtcctaaaatgacttaatatatattatatctctcttgggcaaacacattatgtagattcttcaatctgactctctttctgattattctttacaacgttgtaatttgtttggacaaggctcctctaaagagcttatctttatttaatttaaagtgaaacacaatttaacttagtaaaattaaaggataaatacacccttgcttactttagagacattctcattttagaggagctttatcccatttgtttcacccagagtttcactgtatattcatgtgatgggactcattattacactaattctttcttcattttcctttagtggatgtttttccccttctgtttctagttcaaatactcctattttaaaaaggggggggggaagttatgggtcaaatggctactacaggaaaacataactgagttgattattagatttgattgaccagtatgttttgttatataaaaaatgattttaaatgccctgatctgatatcttttcctttactgtcttcttcatgttttgcaattttaaaaatattgtattagaactgtatctgatgagctttttcttcacaagcattctcacttgttatgtttcttacacgtctgattgttgaccttttttgcaggtggaagatttcataaaagctatatttacagactcacctttaagaaaagattgtttatggaggatacaaaatccgagcttttagaattcatctaacttcctactaaatttataaatcacgaagaacacactggagtttgagagtcagagatgatcgatcacctaggcaaatatcatgtgagtttgagctgctgctccaaatattacagctagcagaaagtacagattcgaagcagattcgtgctgacgaattttctgatgaggaggcttcgccataaagattttgtcgacaaaagtcttatgctgaagaagtaatagtctttttttctccttccttttccgtttaaagcaaaactggggaggggtttggtgcagagttgtgcctcgtttccattatagagcatcctaattgttactcattaacaggaaacacggatatgaattcaatggtagatatatacttgtaatgctgctactacaaggcagatttagtgagaccatttttagatgctgatagataaacgattgtggcacaaatgttggaaatagcatttttcattcaggtgttgtgattcgcattattacgttataaatgctacatttggttgcagtgtacaaattgcctacattacagttacgccactattggatgtatcgaccttatgtaatagaaataatttgttgattatatttaaatttaatccagtggtctataaaatgtcgagtttgtgttacaagacttaggaagacatcataacctagggatggaggtttatcaaagacaaatgtttcggttagcttaaaagttaaaagctacatctaaccaagacaattagtagttgacaaataacattgcttaacgaactaaaatcttaattctaatcataaattaagttaattttaatctaaattaacgaaataataaataattttgaattaatatgaaatattatatgtgatttatgtaaaaggaattttcaatttaatgatgagttttaaaaaaaataatattcaattaaaaattataaaatattataatagttattaaagttatgtaatataatctcttctgaaatttaaatatattttcaatagagatgcaaaggaaatcccttttagagttgtttacaattcgataatatttgaaaaatcaatccaaaaaattgaaccaaccaaaaaacctcaaacaaaaattgaaaatattattttttactgattggatcaaatttcagatttagtttttaaaaaaatcaatctaaattgaagttaaaagtgtatatacttttatttgtaaattttagtatgactcatttacatttttgtttcttatatattaataacttaattattaaacgcatatatatatatatatataattaaatataactttttaataactatttgaataaaaatatataaatataattatcaaaatgtaaatttattttactatatatttgaaaatttattctactattaaatatataatgacttattgatgcaatattttaacattttaatattttttattatgtttgtatcatgttttaccacttattatatattaccaatcaatccaaaataattcaacccaaatcactttaaattagatttgattgaatcaaatttaaattttaaactaatcataatttctctttaaaatccatccaatccaatctaattttcactggacaaggagctacaatccactagagatttaggtcataatggcatcatcaccctacgtatcaataactaatgatttatacaaaaggtagatcaaaaagttcctttgtcatgaaggttgaacctgttagctgaatgctcattgatagggaaaaagaaaataccaaaacatgctaacattttccggagatatatcagtagccactgaatgacatatatcaaaatcctcagagaagatctcactcattactagactggtcttttaacttggaacatggaaaaacagaacagtgatcacaataatcatgagaaacaagttgcctgtaacttaaaaatcggtggttgaaactttaatttggcataaattccttatataaattgatcatagctcatccttgcttgaagcatcttcccccattagttcttcaagagaaaattcatcctcctcaattatttctccatcttttccatcccatggttctgtctttacaatggttggagtgccttgcaggggcaaattccctttgcctccacgtccagcttctttcacaaattctctgaagaaaataaataggtaatatttaagcatttgtttatctcaataatgtgtttagcatttagcataaagttagaagaacaaacttacataatctggtcaagttcaaaagcactcttgagaggagcataaacagctttcttaaggttaagggctactaaagctggataaccataccctccaacacccacattcttctcaagatctggctgcttccctgcagctacccagacgtagctgtccacgacacaaaaattcaattaatattaagaatttgtcaacaaagactaattaaaatatgcatatataaagcatttgcaacattgatagaatcaaaaaatttagaaatgatgacattaactagcagagtgatattaaggtgtggtgtggaatctaagcgaaaagtacttttatacttgcctgtatggattccttttaaacttctctgcaacagatagtaactgctgaagatatatgtttctcccctcagccttggaatctaaaatgtcaggaaggaaggcaacaaaacagattgcggcagaaccacatttctcttccaaaacatcctatagagaaggttcatgttaattatcttaggcaaagcacaggttaaggaaacgaaataggaagtatttattaaaaaataaagcatttattgtatcaaaaacaaaaatcagttaatactttttttttgaataatcgaaatcatttaatatataatcagtgcgcttagggaactatcatcattcgttatcttgtattcctctctttcaaaccaatgcacaaccaaataggtaggtaggagagaaaatgcttactggactgtgtagctctgtcacttctggaggagcaacgtttgtttccagctgctctaatgcaaatgattcaatagccaaggcagttcttgcgccttcataaggaataggactatctttatcagcaccaaacaccaagattgttgggaatccttgaactttgaacctgctcattagagactgataacaaatatcctgtcagaataatataaacaaaaaagcataataaaaaaacattaataatgaacctgctcattaccttttcagcatcacagtcaacatggcccagtttaaccttccctttcaaattattggatgctttcttccactcaggagctaattttttacaatgtccacacctttgggaaataaaagagaatgaaagttattagagcgacaaatctgtaggaatactttaggttcagtcaggtaatcatgatatcaaaaattagattttggaacacaggaaacttaccaaggtgcgaaaaattccacaatccagagttctttgcttttgatcaccaattcatcaaagttgccagagttcaattctactgaagaactggtttctgtcttttcactagatcctcctgttgcttttccacttaaccgatccttcaaaagagcctttacctatacatgcagataattaatgtataaggaggcaatattttggagtaatggtattacattttactattttttttaaaaagcatattagaaacatgggagaaggacttagcagtgagtaacaaatcacaaaaattaattggtgaattacgatgtgatagtctgcccatttagatttttatttattattctgataaaaagttttccattgggcaacaacatatcaaacatcagttaatcaaaataaaccatgaattataacacaactgaatgcgagtgattttnnnnnnnnnnnnnnnnnnnnnnnnnnnnnnnnnnnnnnnnnnnnnnnnnnnnnnnnnnnnnnnnnnnnnnnnnnnnnnnnnnnnnnnnnnnnnnnnnnnnnnnnnnnnnnnnnnnnnnnnnnnnnnnnnnnnnnnnnnnnnnnnnnnnnnnnnnnnnnnnnnnnnnnnnnnnnnnnnnnnnnnnnnnnnnnnnnnnnnnnnnnnnnnnnnnnnnnnnnnnnnnnnnnnnnnnnnnnnnnnnnnnnnnnnnnnnnnnnnnnnnnnnnnnnnnnnnnnnnnnnnnnnnnnnnnnnnnnnnnnnnnnnnnnnnnnnnnnnnnnnnnnnnnnnnnnnnnnnnnnnnnnnnnnnnnnnnnnnnnnnnnnnnnnnnnnnnnnnnnnnnnnnnnnnnnntatttatatagacctgtattaacaagtagtcacacaatgctcaaaccctaatcccaatacatccaaatcctcactctgcttagattttctacactaccaagtgatgtttaaaaagaatttccctttcaaatttttaataagaatcttgtttactttgtagtcattaaagttttcatagaaatacaagaaattgttttgtttgttacaaaagaggacatctatctactctatccaaagtccaacatcacacatgcaataacacttctcataaaacatcagatatattccaccacgtttggggcaaaaaggttataaaaaaaaccacatgagatcccaacaaacctgttgaagtgcaaattcagcaattggtttgacatctcttgctccttggtaatcaacaggtggctttccaggtgcaaacacttttattgttggaaatcctctaattccatattcctgtagagtagggaatcaagaaaaagttacacacacaaacacatgcgaaaatctaaatgtttttgaaacttccagattccaatataaattatgatgacaattgaagaaaacagccaataactgaaaacacctacaaggagtaaatgagcctcatgcaaatatgcagatgttatgaagaaacagaaaaagaatgtccaaagagatattctatcttgtacatgtaatatattctttggttgctttacatacacagtgggggctagatacgaaaactttacacatacaatattcttgcatgtagatattccatacaacaaacacgttaaccaaaatggctgaggtgattagatccaattaatcatattccaattatttgaaacagttcctagagctcaaatgattatgaataacaaagccgtgttttgcataatgcttgatccacaaaaaaggtatttccagtgtacattatacacaaaagttaagcatataataaagcgtcttcgtaattcagaaaaagctgactgcaagaaccaaagaacatatacagcatagtcttcattcaacagatttcaacatttaattatacataaaaatgccataattaaatgaagaaatgaacaatagacaacctgagccaaagacgggtgagcatcagcatcaattgccgccacagtaacaacacccttcaacacagtagctgccttctcccatataggagtcagagcttgacagtgtccacaccatggagcaaaaaattcaacaagaacaactccatttgaattcagaacctgcgaagaaccttgatatcagtcatcaaaactacaaccacaaaatatcaaacttggcatttacatgcccagatggatttcaagagcaaagatgggaaatttaacgtttatacgcaacaaacatttgaaaaaatggcaaaaacagtgagatcacgaaatggggtaatggagaaagggttaaaaaattaaacttgattcaccttggacttgaagttagagggagtgagttgaagcacgggtgaggatgctccatagagtgcgtatgaaggggcgaggttgaagatgaataacaaaagggaaaaagaaacgagaaatggggttcgaaattgagacttcgtcattgtctttctctcacgctttgcactctgaatctccccgcaggtaagaaaaaacccttcttggtttttctgttcgaggacttgctattgctacgtgtgtcatccaatcatatatttacacgtcagactcccactttggcaaatgaaatttcttttttttacataattgaaagttaaaataaagaatttgattaatgttaaaaataaaaataaaaaattcttacctttgattcaatctttgcatgatattagtaaaaaggaagcatattaccatggaaagtttttaaagccatgggcattttttttttttatctgcatagaaagaatattttacatgaaaaatacattagtatttgcatgaagaataatgtttaaattagagtaaaaacattaatatcttacatataaccttattgatattcttaaatgataaaataaaaatgtattgtactcggaaaaacatttttatatgaaagtacatttatagtctttataaaaaaactatccatataaaaacttattaagatttatagatctattttctatagatgtactttttaagaatataaaaacttattaacttgattctgttttttttatatatacaaacatatcaatatgtaaattattatagatgtttattttaatagaaatttcacataatttttttcctaatatataatacttataaacattttttatatgtgcacaataaagacatataaatgttcccacaggtcaataaactagtttagtttaaaaagtaattactctttaacactttttgtctatataagatatatcaatagttgaagaataataaataatttacatgttaaaaaatttcctacttatttttcatcacataaattaacatgaaacatacccatgttctgtgtttctaagaacttctccatagtattaatattgccttgagtgtatgataaaccctatatagaaatgcatatatctgccattacctataatgtgttacttattgagggagaagcgttggggttgctcaaagctcttacttggatgacagatatcagccttactcatcttattttggagtgaaattgcaaaatagttgaagataaaattaacagttttgcaacagaagatacagagataggagatattattgctgagtgtaaaaacatacttgtgcagaatccaaggaatggactttgtaaagagacacgcaaatattgttgcacacttgcttgcaaggagagcaacatatcacgctaggctcaaagattttcattatatcccttctcgtatcatgaatgaaatgtcttaattccgttcttgtaaaaacaattagaatgtgttacgtttatattaattgttgcgaactagagtcagagaccaaactgttagaacttagaaggtaaagaggcatataaatccaccttttgatccattccaggcatcatctaactttcatcattcgttcgggatacctccagatcaaaacactgattccactacgtaagttactaagtatgacagactgtcacttcaaattcgaatgtgcaagatgcatctccatctccatgtattttattagatcgtttacttgtaacttgtaaagtacaaccatggcatcaactccaataagtaaaccattggaatagaccacattccaacttagattacacaaccttgaaccttgggtccatcatttgttggaatttttgtttcacgtctttcttactagttgtctgaacagattcaagtaaaccattataacactcgttttattttccaccttagagacaagtcccacatccaatagtttcttatataagtcattctttataaacctctaacatgggagtcagtttgccgagctgagtaacgttagcttgtaacctaagtaggggccctaaagtgatgggacatggctcgggctatgctcggtcgggttggtagatgcataatgctggtctgcccgctccaagttaagagatgagtcatgggacttgggcgaaggctcaggtgtcctgactcctaaactggagggcatagcgtgaggctggtttaacagagcagcgatcaccaccggctcctgacagtggggggataacaggctgcagcaattccaacccaccatgactgggtataccaagctcctgaaccatcatttttttttttttttttttttgtgtaatgaatcaagtgaaattcacactttcttaatacaacaagtggttttttatatatagtttaaaaaaagttaaactatcaataacaatttctgggactaatttattattgtcaagatacaccagcctttagcagtttaccttcccaagagaagcccttttgaataatcatcctagaaccagacgtttctacaaacctccaatcaagcttgcaaatcaaatttgtcattagagttatgaaaagaaagagcatccattaatgaagtgacattttggtgtacctgaggagaatgttctagaggatcagattaattgatcacaagattccaaactaatattttatgttcctaatttcaattatttgctctagctgatcacagtatgttaagcacctttagtcaaaggaattattacatagtcttagaccaattatatgtccataattttaatcactctctactaagtaggtgaaattttcaattttcgagaaaattcataaaacacaactataagagattagttgagaccataacgatctcaaaacatataataatttctccttttaactgagactgacctctaaattttaaatattattacatgccaagaagatatattttaagtttcattcacgaacctctaaattttcaaggttttggagtctcatgcatcgtgtgggacccttacgtacatacttcaagtcagctaacatatcttttaaatatgatggatctagctttcatcactgggaagtcctgctagttgtaaaacgctttatatttatatttttcggttccaaactcataatgtttctcatttttgagtctgtaatgctgaaatttcgtgatcctatgcacaacgagtggccaagatcccgcaaaaagaacttgatgcacgttagtggataacaattctatgttttcgaacatatgggcatgtatttaatcacaatttcaactgttaattttctattcaactactataagtttacactatcttctaaagtttatgaaataactgtgggtaagatgaagctggcaggttgtgtgagatattatcatttatttatcacaaatcaaaccacttctttctcaacaacaatatcaggatttatagtttcttctagcctttttagcatggtcttacaccttttttattttcccttctccctggtcgtgcctcaccaaatccctcacatgattggtaaaattgaatccataacaaagtgaacttccacatggctatatttaaacaagggaaataagccatgagtcaaatcatcaaattaatgctgttttgctagtatgagtatgtcttgaccatagctgcataatacattcttcttaaagccttttgggtccatattagaaacaatcatgattcataagttcctaatagcaagtgccaagaaatgtatttccttacaaccaagctgtgctagttaaaacatgactaccttgatgattcatttaagtgtaatgttgataaattagcttcaccgtatgatgtagaatcttgatgatacaaagctttaggtttgtggttttgcaacaagcctaggctggctttagatcttgtgaagttacactcaagaattgttaaaaattgttccacaagaaacggcatagaaaagaatgagagaaattgctccacaagaaatactgtaaaatcatgattataattatacatgaaaaaccggtttaatccagatttggatgacacgctgaagtaagattataggaatttcctttaataatatcatcttctgtgaaattacatactgacatttccgtgctattcaattctatgatttagagataggtaatggcaatattctataaggagtattattcactagatatcactgaagcctaaagaaagatataagaggttcatatacatctcggtgagcattttcacccataacataatctgcatgtgcataatcatttctgtactgcactacaagcttatctgcatcgtgatctttgaggatttctaacagacgttgcacatccttaacatcagaaagagcatcagcccctccataactcaggaagagaggaaggtcatttggaagtcttgtcatgtcatatgctggaggagtgggttgtccatagtgtttcatgttctcatctcggttttcgtaatcaaacattgaagtggttccttctctgatcactgatatccatatatgattaaaattcatatcacctcatgaaaaacaaaaaactattcttattaacatctgttatcagttaaatttccaacatctatgctaataagtaatatgcttcctttttatagggtattggtgtctacatgatatttaaattagggaaatatgaccacttactctgagatagatggatcatgttctttgttgctgttgactgaggctcatgatccaaaaaaacatttacaatcgaagggttcaggcagcagttttgacctgaaagcataatagtgtcgtcaatgtaggaaacaaagtgttaaatatagagatttcttttggtggttggtgggagggggttcctcagggttaatagcataataattacatgaatgaaacctgtgaaagaggtcaacaagttggtgcagtcaatgcctgtgttattgcacaagtcctttagaaacttaataacagagcccctattcaaacatgagaaaaaaaatgaaatgaaacaaatcctcatatgattggagtcactaacaagattagtcataaactggtttacttctcaatttcatcctccaaatttatttatgactattatcacgtcttacagaaaatttggttaccaaattagtccctcaaaaatttaaaacattgttgtatttgtctaatttggtgaaagattagatatttgaagacatttcactgataaaatctttggaggaccaatgtggtgacataaaagaatctttggaggaccaatgtggtgacataaaagaatctttggaggaccaatgtggtgacataaaagaatctttgaaggactaatttggtgactaaaatgtttgaaagactaatgtgatgatgcatataactttggaggatcaaattcatggttttcttaaatattagttataatttacattcaatggaaagcacaatttcacgtcaggatggattctgactctgatcttattctatccaccaagaattttgtgaaatgtcttgaggaagtaacattgcagccttcttattcttagccaaagtgcagagaaattaatgacaatgaatgatagataatgagtgttacttaccctctcatattaaattcaaagattcccaaattgtacagtgactgttagaaaaaaaaaaacagatttttagtgtcaatcttttgaattttaaacagaaattttcttttccttttttctttgtgcaaaaataaaagcatgttcataactaaatacctctgcaataaagttttcagcagcatttttagctaggggtgaagtcatctgaccaacataagcaattgggctaagtaaggcagctgatctcaacatgttcagtaactgatcttgggaaagagcagccaatgcaatcaaagttccctacaaaagaattcaacactcttcagtcagcaacacattgaataagtcaaagacaagaagagcaagtgtagcatgcgaaattcacctgtgagtgaccaacatagtgcaatttttttccagttagatcatgcacatacttgaatgtggctggaagatcatgtgcaactaattcatcccatgaccaattccaataatcctaaataaaaaaaacttgcataagcaataggaccaatcaaattgctgaccacagaagtgaaacaacattttcaaacaaactaaccgagctattagaaggtaaagatgtatgttgccggctaaatttagttccacgagtgttagcaacccaaacatcaaacccattatccaccaaaaggaacgcaagagactggtttgaaggtagcaataaccatgttatgccatcctgcaaccacaacatcacattaattgccaacatcaactacaaaatccatgacacatagttgcttatgacactattaatttagtaaccatgaaaagtccatgctgtagaagaaccggtggcccccttgattctcccattctaattcttgccaagttaagaatataaccatcttgtgttgtcacctaaaaaccattacaaaataagccagttagtagctactagctgctctaaatcttgctcatttctggtcagaaacaataaacagatgcaagcacagtacataccaagtgttctccacaagtgtagccttgtgtcatcaccattgatgagcaaataccatcactggggggtgatgacaatgtagcggtagtgctaagtggtgataattttctcccagttgcaagagttaaaccccagaagagaatcacaaggactgttgagactgatgtggccatgttctgtttcctggtacattaatcttcccaatccagacattattatttatacacgcagaaaacaggaaaaaataatagtactaaggtattcacatgaggggttttaaaccaccttttttgtcaacagtggtttaaacaaaagtatttgtggggtctaccaaggagccactattaaattataagattttaataccaaaaaagaaattataagattttggattttgttgccacggttctttaactttgaaagtaatgtgtggatggtttttcaccgcagaggtgactcctgaccagaccaatgtggctcatataaaaagccaaaacatgtgccttcaagaaaatgttatgccatagttgatctaagttttgtcccacaaagcatacccaagtcttgcttccaaataactaaagtaacacactggaagtcttgcttattttagacgcatggcattttacagatgtattcacacttatgataaactaacaaattagcttgattaataagtatccaatacattgtactgatatttttcaaattgttaggagtaattagcttgttaggtatactagcaggttgttagtttgttagtagtatttgtcaattttaattagctctatagcaaattaataggacaatatttaaaactattgttgaaatataaatgattaatttaaataaatatataatacacattcaagtttgcaattagtaagtaatgaggattgaattattattactcgttcctttgagtaagtaatgaggatttagtagctgaagttataataattgatactaagtaaccaataattaaaannnnnnnnnnnnnnnnnnnnnnnnnnnnnnnnnnnnnnnnnnnnnnnnnnnnnnnnnnnnnnnnnnnnnnnnnnnnnnnnnnnnnnnnnnnnnnnnnnnnnnnnnnnnnnnnnnnnnnnnnnnnnnnnnnnnnnnnnnnnnnnnnnnnnnnnnnnnnnnnnnnnnnnnnnnnnnnnnnnnnnnnnnnnnnnnnnnnnnnnnnnnnnnnnnnnnnnnnnnnnnnnnnnnnnnnnnnnnnnnnnnnnnnnnnnnnnnnnnnnnnnnnnnnnnnnnnnnnnnnnnnnnnnnnnnnnnnnnnnnnnnnnnnnnnnnnnnnnnnnnnnnnnnnnnnnnnnnnnnnnnnnnnnnnnnnnnnnnnnnnnnnnnnnnnnnnnnnnnnnnnnnnnnnnnnnnnnnnnnnnnnnnnnnnnnnnnnnnnnnnnnnnnnnnnnnnnnnnnnnnnnggaaagaagtgaaaagatctatgttggttgtgaaggttgattaagttcaaacagtatgaataaccattggatacaagacgaagataatggacaaattgcttatgtggctaaataataaagatttaagttatcgaaatgatattttcactgcttgtccttcaaattgcttggagttttcatttttcaattaaaactaagaatatgaagagaataatgtaatagaagagtaaggaaaattaagatatttttttttttgggtgaattcaaatattccaaacgggagctatagataaattcttcaaactcttgatctattgtttaaggcaagagttatttgccaaattatgtcacattttatttttgttggtttaagagatattcaccactagataattaaaaaaaaaatcaagaagtgaaaaggctagaaataatgtgactaacgcatcggtgacgagtgtttatttaatggacaatgaaaggaattaaaaattgggagatgaaaagataagtaaaaacttaacgtgtatataacaaaatttgcttacataacaattaacaataaaatatggtataaaatagcaaacgtatacctttttacgcaattttgaactgaaaacacttgatatctatctttaaaatggataattttcaacgtagcattggtattgacacgttttagatatgttctgtgcatttcatctctttgatttaaccatcttggggatgctttcttagtcattatctaataaattaacatcaaattcatcagctgtaatttcctgaatctctaaaaggttgcttatttgggtgaattatttaagcattagaagaaagcttttcaggtgaagacgttgattctagaaaattttcatctctataaaaaaatcctcttgaatattgaattacttctttttagtgtccaaccattgtacattgttaagataactttaccactcattaaaaaacttaaatcattattacgtaaaaaaattggtttaataggaacatatcaaatgacattgtgacaagacaagtatgagaagctgattttagttatctatcatgttaaaggtaatcttggccatagattttaagttttagaccaagactaacccttcctccattctcacaccactgtgaactataagacgtggatatatttgagtgttaacctaatagtactctcgtgtacatttttccttcaatctcacactaatgatcaattctactgaattatgagaaatgctaccaacaaactttttaatactttcttttcaatattttattttctaatatgtaaaattaatttaagtctcactaaatatttggatcttttatctcatagcgagtctcattcccaagctactggaatcctcatgaattgaacaaataggagagggaatattggaaacaaagtattaaataggagaggaaatattggaaacaaactattagaaagtatgctcctatcactcatcttaaattattatcttgatggaaaattttgttgttaaaattacactattaagaacttgttcattccccttgcaacacaaatttactattcagaaaagtttaaattgaatagacgtaacaaaaagtggaaagagagagatctatttgccagcccccaaaattaaaggatgtgtatttcagtatttcctccattataaattgatcaaaacagaacataagtttctaaagcactcctcccatgagggatgaagaatttatgaagctaagggcgagcaactgcaggccaaaataaaatatcagagcaaaatttgatgattattgataataactaagttgctactctgtttgtctaattgaaagcctaatccagtatctgcagccatctctatcaatattggtgcttgaaagaaccatttatagtagtgtactaatcggattttacagcaatatgtgtggtagaagcatcctttatacgtgtttcaggttttttgtggcagtgtcagacactttgaatcttgtaagtttccttctaaggaactggaattgaaaccctctaggctttatcttcccaagcaattgccatcttttaggtgtaatctgtcctagcattttcatctgctcctttcggaacttcttagttgcataccagattccacctctccatcctaaggcatacctgtatataagcttaagtgagaacttgtaactaaaaggaaattaaaatgtttaaacccattgaatgcaaaatatcaaaagaaaataaaagtcaatgtgcatggcttatgaagtaaaaacacatttgacagaggaaacttgttcatgtcaaacatgtattatgccaacccaatgtgaaatcaaataagtttgacatcatactagtactatcatatatttcaaactaagaaacaaccatattgaggaatgatatgtatttgagaaaacaggaaccagagataagaaatgaaatgtgtaagagtttaagggagagagtgacacattatgcccccaccccttcccatttttcctcccactcccaaatttcttctctatttgccaaactacacctgatattaatcttcgccattgattgattatttttgtcatcctaaaaaatttatgaaaccattagtatatgaaataaaaaattcgtgtaaacttttagttctgtcatccgcattcctcctctcagtgtatttataaccttgctcacagtccctctacctctacacacaaatcaatattctgtcccatgtttccctagtacataacataaaacaacaatccaagaaaaatcccaaaatagataaattggtcgggggtttgtcgacaagggcagcagcatggtacgtaaacttgctgaatgtgggggccatatatttaactgtaggtgtgaagaagaacccaaagcgttttgggcaagcagaattatttgagtgttatgtcagaatggtaaattcaatcactaaggaaagaatcacaatgatctgaacaagagatttagagtcaatggatgagtcagggcaagactttccgctataataacttatagttatacacaattaaacttctctaactaataattaacttaagctgtgtagtttatcatcaaaacattctaatcatacagaaaccaaagccctattccaactcagtatttcatgataaccatggcatactataacctttcaagtttttgcatttcactatagaaattttccaaccaacaacattcatactttttgtttatgtcccacaaactcagtgaatgctctctctctttatttttcaattacaccaatgatatcaatgctagctagctagcattatctcctgaaatataactaacaatatgttaaggagcagagcatgttgtttgcaagtaagtgtgggaacaaacccgatgattaaggaggttccagcagtggcgacacaagcagggatactacaacctccggaagcggaacccgagacaatgtctttgatttcggaatgtttgagattggaattgtttttcatctacagcatgcatatttagatgaagcaagagaaagaaaaaacaaaagtaaaaggaaagagatgtagatagatggatacagacagcattttcgatagattgaagcctttgatcaactttggtgtcatgtaaatggcgcaaggaataacctgagaaataaaaaagtgagtgaggggtagttattgttatgcaaacagaaagaagagaatagagagaaacacggaccgaaccaagcagtagcaacggaagcaatggaagttccaacggtgaaaaccacgcgatgtctctcaaaagtatcctatacaaacacaaattcatgacatgagatgaaggaatcataaacagaaacataggacgaaacgaataccttggtggaaaaataagtatcttgaatggcagcccgtgaattgaggtacttttttttaaggttgggcgccgacaacactgaactccttaatcgctgcatttcatatcatacggcgttcttcccacgctcaaataacaacctgccactgccactgcgactgccagggaaaactggttacttctttcccaattcaattcatctccccaaaattatatctaaaaaactgcaaattagtaataatagacttttgggctttggcctatttcacccaaaatttcaactaacaggactattacttctataaggaagctactattggtctcaacctactttgctattagtctcaaccttccgacagaaaagtccattttacccctcccttttcctccttcctcttcccccatcatcccacccactccctacgcccccaccttcttttcacccaacccctcacagctccaccctccccccaccacagtcacgcaaccatcatcatcatcaaccacctctgtgttgctccacctccctatcccatctcttccgtgtcatgccaccaccatcactatgctaccatgcacatccatcgttgcgtactcctctaccataaacggaatcacatttccgtatggacatttggccacatagaaacgtgattttgttgtgttaaggggggtgccgcaaaatataacaatggaatcacgatttcgttgttatgtttgggatgagaaaaattatacaacggaatcatgattctattgtgtatgaatacaacagaatcatgattccattgtagtaagggggtgaaaactagtgcatgatggaatcatgataccgttgtgcattttgttcaacggagtcacgatttcattgtttataagggagacaaaaactgattggtaacggaatcgtgattccgtggggagagtgtttttgaaataaaaaagtctcaatctcttggtaggagccaagagcaattaccaagggaccaatagtaaattccttgctcaaaaataaaatattcatttgtacatttatcataaaaaaaaaaattatatgtgtttcacatatatatttcaaaacttgtgacttataattatgataagaaatttttgaaaaaaaaaatccccttctgaaaattcaaagaaaaactgttataacaagtttattatctttttaaataattatcttaaaacaattcaaatgatgatttatgattgaattacaatataaaactattttatattgtgagtgtataaacattaatctcgtaaatttattatgcctaatgattaataatacatcaaattagttcattaaattataagttttgattcatttagttttttaagttacgaatatctcaattttaataaatatatatactgataatggagaagtatttaatattatcaactaataataaacgattatgtaaaataaatttgttatttttatattaaccttaaaaataataataaaaataatttatgattgatttaaaactatcattgttaatatataaaaaaaattagatgtcatttcaaaattttaaaaaaaaaaaaaaactcgtttattactgtcaaacaccgaaatgactgtcatttaaaaattctaaagattaaaattgacattgtttaatttcaaaatctaaattaataataattttagtgattaatttagtgtgtaaattctgttgctgtagagacattgacaatgcatattacaaaaagcagttctactatgaaaaagaaaattataatgtattaaaatatcaagtttttacaacgaggctcatcaatgtctctttagtctgactgacaatgagcttactttcttttaaactagatttcaggtttaaaatggaaacttgaaaaagttgtctcggtgaaatagtacatccaagttgactttagattagtcgtgtgggggagggagtatgagatgatacacaaacaagtgcaaccaatactgatttctctaatgcatatgtttctttcggataagaatgcttgtttgaaactatgatgagggctaaccaaggatccaaaacattacaatcaccacttatctacaagttgtctatcttaagtcttaacatttgtctcatatttttacaaggcggacatcactctgtccaaatgctgttccacatgcaggacatttgcggtgccgaagctctagatttctctgaatgcatggattgcagaacagatgatagcacttgacaatcacaacctgccaaatacacacatcaaacttttaggtgtttctgttgcaatatattctattctagatactactacgtataaacatgcagtgcaaatccaagaaaggatgtcaaattagctttgtattttcttcatttcaaaagaatcatggtacatggcacaagtcatataactacaatgtgaaagcaagaaagtgtatgtaattggataagttggcttgtggttacctcctttggacgatcagtacagacagtacacttgatcatgttcttgcaaatccttatttctttttcaagtttttgtatcgtggtttctccagtttcagaagtcagctcgtcaattttgcagttcaattctcttagttcttcctcaagcttcttccgtaaactcctgcacgacatataccaagattcttgagctctaaaactacttttgcgattcattgcttattcaatccctaaccaacatttctaattcatcattttcacaaaacttgagattttatatctctaggtcattattagaattaaaattgtatcagcgagttgcttggtgcagatgtaaaaacccttgcttgaaatcctatccctggtccaaatttgacataaaatcaacctccttaggaaaaaaaaatacctttcactctccaattccatttcaatagcttccgtatctttttgaatttgatcgtattctttctctgaagaggaaacagcagacttgagcaacttcaattccttctcggcatcagccaattcccattttgcaaattccagggtgactgcaaggtgtttttcttcttggttacatttaatggcatcggatagaatagctttcatctacaggattcaattttttgtttaaacagtaagcagctgctgcagcaaatttgttcggcataaaatcaaaataaattcgaaaagacagcagggcaagtttgacctgctcttcactgtgtgtaatcctcgtctttgaattttctattgatgtattaatttgctttagttgcttagctaaagcctgcttctgggacattaaagtgttgtgcgcctgttttgtcttcacgctatctgatacaagctgcattaagattgcaatattaattaaaaaaagtggtattactaaccaaaagtcaaattatttaagaacacatgcacttgctttcagtaaatagcacaacattcagtgcatattaagttcctgctgttagagtgagattttgtccttccaaaatcaattcctacagcaaaaattcatgtgtttgagagaattgatttgtctaggtatttctccgaaatcaattatcccaaatttctaggttgatccagagttgattctaggagatgcttcccaccaattctccaaaaaccttcttaatttgattcaatcttgtaagattcaccataatttatataaaccctctttagtagtttgacacttctaaaatgatttttttatacattaaccagatatgcaaattttttcagatcaattcatacataaccagttcttcaaaatattaactaacatatatttctaatttatattagctacaaagttgaaggatatgtttttcatcaagcagattagcaaaagccaggataataacctaagcattacagtagtgcacggaaagatggtgaagataataacaaggcagtgtttagtaaagataaaagtaagacataccttaatattgtattcatccctctcgatcacctggtccaacagattttggttctgtgtttgcatatcttcatatgcttgaccaatagtctgcacaaaagcaatcaaataattatattacaagaaataagagttagagtatgaaggggaagaaaaagtcagatagcaaacctcaatttcagatatatatgcctctgcctcagcatctttaactttaacagcctcagtcagctccaaaatatccctgaatacggaaagataaaacgtgcatcaacagattaatagaaaagccagattgtacaacatttattcctttcatatgaagacaatcaatatgaaaaaaccaaaatgctaaaaaaagagagagaaaaaaacattttacttttctatctgacaaagcaaatacaagcaagtgtacgaaaatcacggtatcaaacaactgatataacaaataaaaagaactctgttaagacattcttttgagttatacatgtttcaaaatcaattttattttcattaaaactgtatatgttaaagtataaaagtataaaaccattgttgtatcttcacttaacatcttaagcttttaggttaattggttaatgacatggtatcggagcctctctgaccaagtagcctagagtttggtcattgcaacccctatttttaaaaaatattaaatttcatcccaaggtaaggtgggcctgtatatttatatgctattaagtttttggaataattgattaatgaagtatacaaaatctaagtttagttatttttccccaagaaaatgttacaaggattacagacatgtcaatcaggtttataatataattatgtatgcttatgtttagagttgtttctccaaaaattaatttaaaatatttattcttccataaatacatgttaatacttagctccccaattaaaccgttagtcctcaacgtgtttccatcctcctcatattcctacaactgtaatatttatatttattctcattttataaggcatagtgtaactgcgattctgacctttgccaaataacatgatgtggcatattaaatatcccaaatgaactaatggtaccaatgaaataaatattgtttcatttcagaaattccatgccttggtaacttgttggtcatgggttcgaatcttgaaacagcctctttgcatatgcaaagataagactgcgtacaatatctctcccccttatcttcgcatagcgaggagcctctggacaatgggacatgtagtttttttttcccagaaatttcacacctcaaattcactccatgataaaactcaaaggggctcatgcaaatagcctaacacattctcccaagtatgcagtcataaatgtaaagcagcatagtatattggccaaaagagaaagtccttcaacaactctataaactttagcccgtctaccttccccactcctcatcaccagaaacttttctcccaaaataaacaaacacaaatatttataaggttagaaaaaacaaaagacactacacaagtttgtccatgaagcaaaatatcataatcagtgtagaagtacacctaaacaccaacctctcagatgcatccagcttggacctcaagtcctctatttcagcttctgcagcagaaagcctttgttcacaagcagcttcagcttcattagcagcttttactctcaactctaagctatgctcgtctaaagcatttttcagcatttcagcttgagagtgagccttactttcagattctcttacttctgaatatctgaaattcaaggtttatcaagatcaaatcatccaagtatacagatgagaataaaattgagttgaatgcaaaataaattctctagttggttaccaagtacaactaaatgtttatcttatgttaaattgaacactaaaacctttacaaattgtgcaccatgaacagaaacacttgagaccaaaggaaaagactaaaaactacatatatttctggttgactaatctgtacaaaggatactgaatatgtagattagatacagagagaagattacggccacgggcttgcttggtatccactacccctcttccccttggactggggagacatatgagacagttgataaaagtctcaattgagatgtcaatcatgtcatagaatagacacgttgagccttctttcaaatatcatagcatgtagtgtaggagagataatgaaccaacaatgaaagttcaatggactgccacaaaagagagaccaatggtagtctccctgcactcaatcatcacataacttggcatcaaataattggtggtcagtggaaacctagttcctaggctgatactgagtgcaactcctcagacactaatacccatgaacagtaaagtaaatgcgttttatcatgcgaaacattaacatactagtttctaagtgcattaactaatattatttccaacagtatgtgcaaaaatcaccacactatgatgtatcagatatactttataagaaattttacctcataaatttaactgcatgaaattattgccaacacttgatttccaatcagcataccttttatcataattctcctggccatgcatatccagaacaaactctaattcctgattctccttctgtaacttttcagtctgcaccaaaatattttaatcaactatttgaaaattagtttagacaatcaataagacctctaaaatcacaatcaaataatcctagataattttagaaagcaaagatgcatatgcacatgcatgatacaagtcgaagacaaaaggtaaacatttgcaatatctgtttcagtcacagacatactcaagattcataaagtaatagataagtggcatctatcaaacttaaacccaaacaagacaactgagaagttttactgctatacaacagaggtaattgaagaagaaaatacctatagatcaagaaagacacaaagataaagccaagagaagacttaccaatgtttttaaagacttgatttccaaaacctgttcagcacatttgtttgcaaggctcttcagttcatttgtctgcttcaaaacaaagtaattaacaaaccttaatgctaaaaaaagtatatatattgtttgtattcaatggcaaaacctttggcctatttcagcacgttccaactaacatgacttctcatgtcattaaattcaaaatggtgttagtcaaaataaatatttccaatttgatcaatgaccacattttatcatatactaaccagtgttttatccaataaccatgatttattacaacagtagtggacggtttttgttaacttgtatcagattggaagtttctcattgactttctataatttaacatgcatacagaattatgttcattaaacaaagaaatggacacttggagttcaatgtctataggaacaattaacaactttgcagcatatatttgtgggattcaataatgtcattttacgttgtcaacaaagttaaaagagcttttacttgtcaggtcatgctagagatatatttcaaaaccattcttgcctttttcccaacagcttagcattttagtgaaatcatttcttgacattttacaacaaaaattaagatggctaaagacttgtgctctcatgaaagcccaactccttgtaaaagtgacaatccattgtatagactcaatctaagtagataaatttctgtggaagacctatcacaaaataagtgggaaagaaaatgaaagggcaaattatattggatcaaccttcgtgctcaatgcttctcttagtgaatgtgctttctcacgtaataatacagcctcatgagctgcatctttccatcgctttaattgaccttccatcattcccatttctttagataaagctgaagccataacatgaaactcagatttgatatcttttctccctgaaacgtttaatgttgtaagaaactgggatccaatcacatgcaccacaagtctaaacacagaacaagttatatgctgaccagtatcctgtttagcttcttccattttaatttcaagatcattcttttcaataatacacttctgcaactgaagctctaggtcatcaatcctatggtcagaattgccaaggatctgccttgcactatcagcagactccaatttcaaatttagttcattctcccattttgcaacatgaacactgccagcctaaaatagcatttagaataaaaattgtaaaaggagaaatgacaaatattaaattaaaaccagacttttacactactaaaggggaaaaaggaaatcattgttaacctgcagagattctaccgatgttttatatcgggccaattcagtcatccaatgttgaagttgatcattagccaaagagtatattcgagaagtgcgcacatacttatcatctttcagttcattctggaaataaacatagaagaaaataaacttttacatgaactctataataaatgcatcttaacaattcgagaaaatatgactaaaccatcatattagataatccaaacttacaaacctgaagatcatggaactgctttgtcaaggtctgattgtcttcttgtgcatcttgaagctcagaaagacgatcagcatccactatctatgacattaagcaaccatatatcttcattacatagataacaaggacaaatgaattacagatacagagagaaagataatcacacaacaaaaacctttgcttcctcaattgaatccttcaactcacgcaaatccatggtcctgtcagcaatgttttcaggggacaggtttccattcactgcatctgcattgggggaattcattcctattgctgcatccttttgcatttccagattgactagttttcttctactctcttcaagttcagccacaatctcatcaagctcacctttacatatgacaagacactcacaggtgacaattatgccaaaattataccaaaaatctctgcataaatctaaggacattacttcaggtcatatctattcctaactaattctaaccagaccaattataatcactgtaacttaactcttcctgataatttccctaaattactgaattatgcagttgcataattacaattctctccctactcagcacaatacaaaacatcctctactgaggctgttattacttctaaattatatttgaatttcacaataggtattgggtgagccttgacacaacagtaaggttgctgccttatgaccagtcattgattcaaatcctggaaacagcctatctgctagtagggttaattaagactacatctacctccccaagccccaattggtgggagcctcatgaattgagtcaccttttttaaatagctgtccttgcatttctattcatcaaacttaaaatgtgcatatacattggaatattcaacaattaaaattaaaactaaaatcaaatcatatgcactcaaatcaaccaaattgagtgaatttctatttatacaaaactaaaataaaaaggatttcaaaatcaaatcaattaccattttataattttccaaacaagaaatttcaattttataagttttcaaacaaaaaactccatttataaatcacctaaatttcttaaaatactccattcccaacaataacatttcttcaattttcaatgttttaaagaccagctcattccaaactgcatggcttcattagcttgtcattaacttttaatgactatccccaagccagactgctgatctaatcaaagtactgcactgcacatttacttctccttctacttagcatcgactagataataggttttctaatttaactttggcttaaccttttttttggtgagcaatacaagaagaacgtagaaacctctacaaaaacgaatatcaactaaatcagctcgtaaagcattacaaaatgaagtccggtgcaatgtcaaatatatgaaattgagaaggaatctacaaataaggagttgcaaatgaacaatattttcaaataacaaactaatcaatcatcaaagcaataagagatgaacaatgtgcaaaagatattcaatgtaccatttagccgtaagagatgctccaaaaaatttagagtaagcgcccattttggtcctcaatttttttttaaaaaacattcaatttatttctagaaagagtattacacaaatttagtcctggaaaaatactatttttcagtgattaaaatggagattgattcatacatcatataatattacactttaactgaaaaagatcatcaagcacaaggaaaccttcctttattcaaccatggcacgtaccatttaaatcatagcatatgataatcaatatcattaaaattcacactttttaatattctaaacttcataataactgaagtagttaaacaaaagaaaaagaaacatttcagagacctgcaaggcgtttaatctcagattgatcttgtgagcactcattgatagaattttgaatagcaactgtatactctttatgttttgcatggagagtatcaaccacttcacggaaattatctacctcctctttcgtcatatcatcaatcttagacatttggattatagcatctgcaaaccaagaatgagagacaataacagatcatttatataaatttattcaaagtatcctacaacattgatatcagatagaaaaagaacaaatcaatcattaacaaaaactatatacagcaaccggataccttcagaagataaatctccatgtaaaacctgagctataccacctgctctttccatctgatcatcaatggtatctttcaggagtttcaacagctcccttgtatatgactgacgcaaagcaagggcctcctcaacataactaatgatctcatcatcactgattcccttaatggaatctttctggattaatctacatagaaacatatcctcagcaggacacaaaggaactgaacctagagagtaaatcaagtcagtctcttgaattacctttatactgtaagaaaaaaactacttgtgggtgtgtataccttgaggattatcaatgtcagtcaaatgttgcaatgtgtctttgcctttgcctctcccagctcgtattccaagaagaatcatatcatcaaccaactaggacaacaaattagaaaaactaagccagctagcatattatcctacaagaatatgacaaaaaatgcattgcctcccaccctccaacaacccacaaggccaccgaagcatgcacttcatacagtagtgttactttcaagagaggaaaatactaaatccaacagagtgcagcccgtaaagaaaccaaagcatgatgacaaagaataacctgagtccagaattggttcaatgcaattaacaagtcgtcattggaacttcgctttccttttaattctctaattttttcttcaagatcatgcaaagcatgtttttggatgtctatctgttgaacaagctgttgattctgaaactgtaagactcccgcgtcggcctggagggagcatatcatttcccgttacataattaaaactaattaaaaactaacattgaaaaaaaaaaattatgccacaaagaaagagttgttgtgatgataaacaagagaccaaacatttttttaccacaaactctagtcaaacacctcaaagctcataaaaaaccttgcgcatctaaatttttcattttcaaaatatacatctatattttaaatgaaagactctcaatgacatgaaagcatgacacaatgcaaagaatcataagacatcaaaatccaaccttgctactcttcatagcccagtcagcactcagcagtaagttggcactaagcacaatcaaactgccacccccttctcataaagatcaaaattttatctaaaactacactaccccaggactaaagaggcaattcattttgtgcccacgagaccaaacagctcagagaatccaattacacacccaatttcacatttcactaaaattcagaacaagatcatcaacggaacacacaggacaacattgagatagaagaacacagaatatatataaacacatggatacacaatcatgtagagggagaaaaaggggttacagttttgttgttggtaggagagttgatggagtttcgaggagtgcgggaagagacagaggtgagatgaggcctcttcttttcgggctcgtcgtggtctgagttttccattaagattctgaaattttgaccaaaacccaccacagcattagtaatcaaaatcaatacttgctcaattcttatgagttctctaggaataaacaagaaattgaatcaatatacagctctcctactcttacaaactaaaaagtttagggtgatgaacactgttgaccacttttgcatttatattttaaaaaaatagtattttttactaagtgtattcataaaataaatatttatttttatatagttataatttaaaaataaatattttaaaattataaattatactataattaaaatatataaaaatatttttaaatatgtaaatcatatgttaaatatgaattataatctaaaattttaaattgaaatggataaatcattaagaaaattaaatatatacattttttataagaaaatcaaatatatagattttttataggaaaatcaaatatatagatagaaacaaaagaaaagttgtttgagataattattagagataccgaaatccagatttatttgtgaggtgaatactattcattggctccaagaggtgttgtttattggtttttttttttgtcttacttttcattttttcaaatagaagtggatcaagtgtgttttctgggcttttttttacctttcaagggtaaacttttttaaaattagtaaaaaaatatatttttaaaatttattataaaagatgaataagttatgttttaaaaatacaatttcatgtaaaacaatcgtgttttaaaatataattttgctttgactttttttaaaaatataaaaaagtcatattttatcttattgttttcacaattgttttatattctaaatcattgaagtcgtacactaaatgatgactttagtttttttaataaattagaatagtgcatgacaaagctagtgaagcaactgtgtatgtcaataaaaaaannnnnnnnnnnnnnnnnnnnnnnnnnnnnnnnnnnnnnnnnnnnnnnnnnnnnnnnnnnnnnnnnnnnnnnnnnnnnnnnnnnnnnnnnnnnnnnnnnnnnnnnnnnnnnnnnnnnnnnnnnnnnnnnnnnnnnnnnnnnnnnnnnnnnnnnnnnnnnnnnnnnnnnnnnnnnnnnnnnnnnnnnnnnnnnnnnnnnnnnnnnnnnnnnnnnnnnnnnnnnnnnnnnnnnnnnnnnnnnnnnnnnnnnnnnnnnnnnnnnnnnnnnnnnnnnnnnnnnnnnnnnnnnnnnnnnnnnnnnnnnnnnnnnnnnnnnnnnnnnnnnnnnnnnnnnnnnnnnnnnnnnnnnnnnnnnnnnnnnnnnnnnnnnnnnnnnnnnnnnnnnnnnnnnnnnnnnnnnnnnnnnnnnnnnnnnnnnnnnnnnnnnnnnnnnnnnnnnnnnnnnnnnnnnnnnnnnnnnnnnnnnnnnnnnnnnnnnnnnnnnnnnnnnnnnnnnnnnnnnnnnnnnnnnnnnnnnnnnnnnnnnnnnnnnnnnnnnnnnnnnnnnnnnnnnnnnnnnnnnnnnnnnnnnnnnnnnnnnnnnnnnnnnnnnnnnnnnnnnnnnnnnnnnnnnnnnnnnnnnnnnnnnnnnnnnnnnnnnnnnnnnnnnnnnnnnnnnnnnnnnnnnnnnnnnnnnnnnnnnnnnnnnnnnnnnnnnnnnnnnnnnnnnnnnnnnnnnnnnnnnnnnnnnnnnnnnnnnnnnnnnnnnnnnnnnnnnnnnnnnnnnnnnnnnnnnnnnnnnnnnnnnnnnnnnnnnnnnnnnnnnnnnnnnnnnnnnnnnnnnnnnnnnnnnnnnnnnnnnnnnnnnnnnnnnnnnnnnnnnnnnnnnnnnnnnnnnnnnnnnnnnnnnnnnnnnnnnnnnnnnnnnnnnnnnnnnnnnnnnnnnnnnnnnnnnnnnnnnnnnnnnnnnnnnnnnnnnnnnnnnnnnnnnnnnnnnnnnnnnnnnnnnnnnnnnnnnnnnnnnnnnnnnnnnnnnnnnnnnnnnnnnnnnnnnnnnnnnnnnnnnnnnnnnnnnnnnnnnnnnnnnnnnnnnnnnnnnnnnnnnnnnnnnnnnnnnnnnnnnnnnnnnnnnnnnnnnnnnnnnnnnnnnnnnnnnnnnnnnnnnnnnnnnnnnnnnnnnnnnnnnnnnnnnnnnnnnnnnnnnnnnnnnnnnnnnnnnnnnnnnnnnnnnnnnnnnnnnnnnnnnnnnnnnnnnnnnnnnnnnnnnnnnnnnnnnnnnnnnnnnnnnnnnnnnnnnnnnnnnnnnnnnnnnnnnnnnnnnnnnnnnnnnnnnnnnnnnnnnnnnnnnnnnnnnnnnnnnnnnnnnnnnnnnnnnnnnnnnnnnnnnnnnnnnnnnnnnnnnnnnnnnnnnnnnnnnnnnnnnnnnnnnnnnnnnnnnnnnnnnnnnnnnnnnnnnnnnnnnnnnnnnnnnnnnnnnnnnnnnnnnnnnnnnnnnnnnnnnnnnnnnnnnnnnnnnnnnnnnnnnnnnnnnnnnnnnnnnnnnnnnnnnnnnnnnnnnnnnnnnnnnnnnnnnnnnnnnnnnnnnnnnnnnnnnnnnnnnnnnnnnnnnnnnnnnnnnnnnnnnnnnnnnnnntaaatttcagcttgttaattgttactttttttcacctggttattattacaaaataaaatacatcaaatattatagttgatagaaacaacttatcaaatattttttataaaatatatatttcatatttatttacatttaaaaagaaaaaatagaacataattagcctagttctataatcattaaagatgagtctaatttttaaaaatataatcataataatattgtggttggatttcatatttatattatttcacatttatatagtcaatatgaaataactaatttttataaatataatcataataatattgtggttggatttcagacttatattatttcatattcatatagtcaatataaaataattgttttattataatattatgtttgtaatgattaaaaaagagagaaatataaagattaaattatattttggataaatagtcattttcgtccttgaatgtatagagtactaacaaattcgtccctgaatgtgccagaaaactctttcatgaacgataacgaacggaaattaacgaataaataaatttgtcgtacatttttcattttcagagactaaaattgctatttacccttttttaaaagatctcgcttcaaatttgtaataatgcacttcctctattttgttataattgtcatataagagaaaataaattattataaaataattatcattttagttttttaatgtaatattaagtatttttttatttatatctcttataacattaatggttgacgaaaaaatttataaataaaataatgataatataagattacttttataaaattattattttatttaatctatttattgatttttatgtatgtgtaaaataacttagaacaaaaattataataatgggatagaggtaatatggtttttataatataatattaggatatataataaaatatatattattttataagatataataataatgtaaattgtattgggatgattaatattaaaagaagtattttaataaaatttatattgttttgtttgttctctaaattatttccattgtctaccaaatattatattggacaaaaaattatactaaaattcaagccttgtcatgtgttattttccttgtactatattttagtatgtactatcaaactcacccttaacattgtttacccaatagtttgcagccatttctttttcgaaacaatttcatacgaattttattcgtacgaatcaacacctgtatttcgaatataacaattgagccacatgcactcttctacccgaatatcatattaacattggcattaagcactaaaaacactccaagattccctatttgggcaccttaagtacataaaacaattacaagcgaaaaatttaaaagtaatcatctgtttatagcatcaataggttaagaaggaaaattaacctaccttgtccaaacaatgcaatacatacatgcataattagggtaggtagatgctttttttttcctagtaaatagtatatgtgcccattaggtttactgtttgtagggtctagtagaccttcgtttacattcatgtaatcctctttgtaattttgaggattgtgtttaggtaaaatttgacaagaaattccacaactgaacgcaaagtgttgttgtccaaatgttgttgtcgcatatcaaaatagggtcgcttttgggctgcaaatgtaagggcttaatttataatttctcacaacaacttgtctaattcatccttaattacaataattgtctattattatattatacccattttggtaatatcatatctaaaggctaaagtctaaacacatatcaggtttgttaaaatcatttctaaaaagatttaactattttcggaacaaattcaaaattgacacaatctatttgtgaatgcgtaaatgatttaatctttgacaaaaacgaaaaactacataaaaacattgtaacaaaaatggtataagaaaacatggcaaaagaaccaaataaatacaaattaaataagaaattacgcatttggggcaactttgaaactatttacacatctggggcaactggtcacgcccagaactgggcgtgacnnnnnnnnnnnnnnnnnnnnnnnnnnnnnnnnnnnnnnnnnnnnnnnnnnnnnnnnnnnnnnnnnnnnnnnnnnnctgggcgtgaccagttttgctcccatggtgacacgtggcacaaaaaatgggggtgcagggttttcgcggtattttcgtaaaattacggaaggcgataacttttgactgggacgtccgattgatgcgaaaccggtggtcatgcgctcgaaattgagaggagaagccgctggcaagttcccgaaggggacttgcccaaaactttttcccaaaagatgcctctaagtgtttcaaatttgcgttttaatcttcggagccctaaaaaatttttcgttttttgatattttatctattcaatcggtgaattgcaatccattctttgtttatctaattacttctcttaatttcgagcgctttgacataaaatacgtcatcatcggacattgatacgaaaaattacgactgttcaaagttatatgtatcgtcaaatctacattatatgagcatcacaatgtccttgtaaaaattctgacataaaatacgtcatcatcggacattggaaggacagtaataagaccaatgtcctcgctgatcacaattgttacaagtgctttggtgcattagtttcgccagttctagagagcagtttgcggggattaaaggattactctaaggattatgagcatgagatgatgaagaaggtgaagaagaagaatgaatcagaacactagggaaactggggaaagaagcaaaatgaagatcaaagcgtattttttaaacagtcgtaatttttcgtatcaatgtccgatgatgacgtattttatgtcaaagcgctcgaaattaagagaagtaattagataaacaaagaatggattgcaattcaccgattgaatagataaaatatcagaaaacgaaaaattttttagggctccgaagattaaaacgcaaatttgagacacttagaggcatcttttgggaaaaagttttgggcaagtccccttcgggaacttgccagcggcttctcctctcaatttcgagtgcatgaccaccggtttcgcatcaatcggacgtcccagtcaaaagttatcgccttccgtaattttacgaaaataccgcgaaaaccctgcacccccattttttgtgccacgtgtcaccatgggagcaaaactggtcacgcccagaactgggcatgactggtcacgcccagaaccaggcgtgactacccccctagtcacgcctggttctgggcgtgaccagtcatgcccagttctgggcgtgaccagttgccccagatgcgtaaatagtttcaaagttgccccaaatgcgtaatttcttatttaatttgtatttatttggttcttttgccaagaaaacatcaaatccctgcaagagatatgcgagaatttgtcaaacataaaaagcactggcattaactgagagaactcttttgttggagaattttgtaggtgttttcgaactccgttctattaaatgtataccacataaattagagaaattcttaggtgcacttgaagtaagatatttattactttgattcattcattgttcaccatgtcaacaatttacctagaaaaattaaaaattatcattaatttagaaagcaataatgactcacaatactgacatgacgaataatgaatggatcagaacaacaaaaacgtcttgctccagatgcacctaagaatttctccataaattatgtgaactgtaatgtagtattttgctttaactatattttaatgttatatctgaagcgaaacacatccagaacattatttggtgcacttgtacaccaaattcatcacctcacatgtattgatctatatatagtagctgaatctaagtatgtaaaaattaaagtggaaccagctatatgtagatataaagtattattataattattcatggaaatatgcttcctttccgtaatacttttacggtatcttttctttttcttttatttccagcttttcttaatgcatttttaatcatgaaggatcatttttgttccatctttcttgtttttattgtaagttatatgtgtatttgttaaaaaatcattattcacggggacgtaaaaggatatccgtttatacaatcattacaaagctggattcttttgcttataataatagaaaaagataacaatatccatatcaacagagaaaaatcacagtttttcgtatcttattttatatttaaaaatgtttactataaacaaaagatgttttttcgtatttggaagaaagcagatattcccattgttccttgcgaacaaataaatcacttgccacgcttctttctccattaataaaaaaatagcagaatgactttaatatatgttaaatttagagatgatccaccaccattcattttcggtaacattagccctaataatcccgagaagaattgtaacaaaggtacacaactttagtgtattaatattatacgcactcggttacaaaggcagcaaatagcacagtatccactttctgtttagaaatcaatcatttccgaagaaagcttatttcaaatcagaagcccagaaaattctccactttatttccgaagaatccactttttatttgtcttatcaataataggttattaagaaggtatcaatctcaagttcaaattggaataccatgcaaaaaaaagtttgacattcaaatcatgcctttgaattttatggtcacaactttcaactgaacgtacggcttaaacgaagtcagaaatttgatgaaatgaaatattattcaccttagctaatacttcagacagaaataaaaagaaaaaaattcaatcatgaaagatgatagctccctgaataactttgtccaaacgaagataacttcagacaaaaaatacacatacattctttctattacacaaacgaagataactttgtccaataatttatttattttaaactaaaaaaatgattgtccaaaatcatgaagagaaaattacgggtctgagattccctcacagatgtgaaaatctaaattttgtggccttgatgcatgaaacattcaagacccatgctaatcattacatatctaatacatgacctaattttcctatatctttcagggaatgtctctaccattaggtataccagtcctattttcttttacataatttctcaaaatgattgtttgattatcgaaacaaaatagagtattcttaaaaataaaacggatattcccctcaaatgatctataaaaaaaccctagttttcgtccgtataataatgtttatgatcccaactccataaaaaaaaagtttataattccaacatcttaaaagaatcatatatttttagtctttgataaatgatgaaaaactcaaatcacatcacttttataaatgcatagactaaaaacacgttaaatttttacaggaacttaaataaaatagggagatattttgagaaaacaaacatattttaccttttttaaaataataataaaaaaaaacgtagtcgaataaaaagtagcaaaactaattcggaactagcaatgaacacaccctgtatatcagatcatcatcaactatgttatggatctccaaagaaatgatcgtgaattcgtgattaccgttgcacgtaacacgaaagatttgttgaaaaaattccagattctgaaacaaagaatgtaacactgaaaacccaatcccaaatcccaacgcaatgcagattggacaagaagaagaagaagaagcaagcaagcagggaaagagtaattgattagaatgtaatttattctatgatctgattgccataatttttgtacaggaaagtaaaaaagaaagaaaaagagagagtaagttctaattgggggggtaagggtaagggtaagggtaagggtaagaagcagatccatgaagaaagcagaagcaccaaccagttttccagatcgtccaatgctatgacacagtaatggatccaaataacttacaacaacacaaccttccatccatccatccatctccatgcctatattataatatcactctacaacaccacaacacaatctaacaactttaattaattaagccagagatagtgaacaacaacaacaacaagaaaattatgattataccgacaagaggctcttcttcatcagaggcacagcgcggtggcggggagctcgtcgttttcgtaggcggcatcgggcggcaggaggtttagatcgaaaggaagcggttgccggaaggaggaggtgaggacgcagtcctggtcgtcgacgacggaggaagaagagtcgcaatcgctgtggcaatcgtcgtcgtcgtcgtccagagggatgatagggttaacaaccacaaggggcttgcgagaggaggaggagggaaccctaggcccactgaaggactccacggtgctgctcatgccgctgctggtgggccggttcacctgggcgggctcgaacttggtggaaagcccgtgggcctggtagagcggcggaatctgctgcgaggagtggtggtccgtcgggacggggaaagaggggaaattggtcttggccttgggcccgcggaaggatcgggctgccttgtcgtaggcccgcgcggcatcctcggcggaatcgaacgtccccagccacacgcgctgctttttccacggatctcgaatctccgccgcgaatcgcccccacggccgcttcctcacgccgcggaaccgcgtctccttcgcctgctccgccgtcatatccacgacggcggcggtggctctccctcggcgcatcttgatcacgatattaaaaaaatattatattttacaagaacaagatcgatcgagaacaagcaaggagacaccaccggcttcttcttcttcaaaccccaattcttaatcttattttttttccttcgtttaggtttggggtcccatgatgcggtctcgcctcgtttgctccaatagattgattatacgtgtgtggaatgacataattgcccttttgtcgttgtgtggggactatgccccttacgctagtgtgtgtttgaattttcagtgaacatccatttgcacacatccaagtccaccgaacggaaacgttccgtgagagaaaggattgagttgaaccccgttgaagggtttttaattaaaatccaaacatacttaatttttttaatcgattaagtaacaaaaaatcctttttttctttttctcgaatataacaagtaaattttaattacttatatcctgagattctcttaaaattattatttatttaatgaggttaacaaaatttttatgtctgatttaaacttcaaatgaaaaagtagtttaggggtttgggtatatgctttgtcgtcattattgttgttattgccttcgattccagaccaaaccaccataaatgggagcaaacgttactttgtggtatttgcgatttgccaaatgtaaattaacgttttttaacttgtcaacatgttacgctgagggttagattttctttgtaatagatgtaaattcatttgcatgattaattggtgaagtctcgttggattttcaaaacggtagaagctgctaactaattttcattaattcagcaatcgcaaaatccaactttgttgcttagttggttgaatttatttcatggtagagtaaaggcctgcttattacagtttttttatataaaaaataatactggtaactttgtttaataaagaactaaataatttatgttttgattgaaaatatgtttttttttaataaaatcaattactacttctttaagaaaatacttttacgattgtaaacaaatattaannnnnnnnnnnnnnnnnnnnnnnnnnnnnnnnnnnnnnnnnnnnnnnnnnnnnnnnnnnnnnnnnnnnnnnnnnnnnnnnnnnnnnnnnnnnnnnnnnnnnnnnnnnnnnnnnnnnnnnnnnnnnnnnnnnnnnnnnnnnnnnnnnnnnnnnnnnnnnnnnnnnnnnnnnnnnnnnnnnnnnnnnnnnnnnnnnnnnnnnnnnnnnnnnnnnnnnnnnnnnnnnnnnnnnnnnnnnnnnnnnnnnnnnnnnnnnnnnnnnnnnnnnnnnnnnnnnnnnnnnnnnnnnnnnnnnnnnnnnnnnnnnnnnnnnnnnnnnnnnnnnnnnnnnnnnnnnnnnnnnnnnnnnnnnnnnnnnnnnnnnnnnnnnnnnnnnnnnnnnnnnnnnnnnnnnnnnnnnnnnnnnnnnnnnnnnnnnnnnnnnnnnnnnnnnnnnnnnnnnnnnnnnnnnnnnnnnnnnnnnnnnnnnnnnnnnnnnnaaaatatatgaatttggaaactaataaagcaagcgtagaaatatccaataacatggttttaattatagtatgtatgtttgtttcaagaaaaatatatagtctgtatgtttcagtaaaaaaaaaataattatagtgtgtaacttttattcggtaactgtaaattatccattacttatatcatgatttacaaactactataaatcataaaggatttgctatatataaaaaaagaaaagaagctgaaaagtgtctgaagtaatgtttcttatagtttacatgattacgagatttagttttccacacattaaattttcttgtggctgggtggagctggagactaaaataggttcaactgttgtatatacttttcaaatattagattatttatgctctggccaaaaagtattagatttgtctatactaaactttaagtcatgatatggatgaaagatagaatgttaaaatattgtttatagccaatgcctaaaataggagtctaaattataaataacaaacattattttatactgtaacatatataaacacgcgtagatttaaattgggtgttcataagaattatatataaataacaaacattaattacattattttatactataacataaacatgcgtacatttaaattgggtgatcataagaacaagcacatttaagtgccatatctaatcttaaaaattctagatattctcatttgcattcataaaatcccagaacaaacatccacctaaaatcttgaaatttatagtttgaagttatgtaagttgaattttagaagaacttgaactacattttgatacatttaaaccagtacggaagcacacttatgcctagttattggaagctaggctaaaaaacttacttgttaaatcaaattaaatatttcttcacccaaaaaaatgtattttttatgacaaatttatatttagacgtcaaatgattgatttgatatatttcttctacttgaaaaaagacgagggagacagggagttaattgaatccggttaggaacaccgatggaagtcggaaggcgttgcatttcataatttccattgtgtacacgattcaaatctcttgtcgtcaagcattgtggaatagttcataatgcgttaaccaaattctaagaagaaatattattttcaaaatgcttttatagttttctttttacaattggtattaaattagatgagatgtaatgggaatttcaaaaaaatatatatataaaaagattcttaaaacaatagaataataacaactaaaataatatatgaaaaaataacaatggacaagaaagaaatatcattaggtggaagaaatcataacattctctctctctctctctcctctataagattttctctcttttgcataatactactctgacaaccttaaaagagatattaattattatctcttaagtcaatttctacttcactttatgtcaattataagttattctcaaacataagccttagtaatgaatcaaaaaggatgaaaatgtgtcaattataagttattctcaaacataagccttagtaatgaatcaaaaaggatgaaaatgtgtcgagtactgtttgcattagctttgagaattcttatgtataagattaagacaatgagaatagtcatgacaggtcctggcagcattggaatgctcttgagaggatccttagaggaaacctcaaatgttgcattctgttttggaggaccaaaatttgttgtggaatattcggaacggaaatacgtgcatatttttttatatatccaagttagatacatttaccttgcaaattataactattaatatataattcataaatggttaattgattaataattaactatgattgataatgagttaatttatcggcctaactcgtcgaacttgaatgaatcgtgtttatgtaatattttttctatttggaacttgtaatgtaatgttatagtacatgtgttactcctccacgtcagtcttattactggagcatggatgtctccccttagcaattgggttgttgaactaaacgagttaatgttgcaacctacttatcaaatgacagatatttaattatttataagttatcgtattatcaacaagttacagattatctatcaagtatacatcatttgtaagctcaattatctataacctacaattatatgttagtcaataactacagataattatatacaatggttattatatcactgtaacaaccccgaaatacaagggttcgatgctccccttcattctataaatatcaggtttttgtctaaccctttcacacactaattcacactgagagacaattgcactcacactcttacatgaattaatacttaatttcgtatattcattcactcattcatacataattgatgtacttacttgagtatcagagtcttttcctttgttttgcatgtccctcctcttaacaaagtcgatttactgtcttacatgtaaagatctggaacctaccttaatcatgtccatcttgacatgcgctacatccagattttagtaataacaaaattataagagtgatttcaaaagggaaaatattgtatatgttgctaattcgagtgaatgtatgtgacattagttgactttcccccaccctgttttgatttatggatggtgatttggaacattcatgtcttttgtacttcttttttcccaagcatatgccaaatgagaaataaaaattatctattattatattataaaaatagatttcagcagtgaagtagtcccagatcaaatttcactcgattgaacttcatttggctgaaacttaggcttttttggttcaatgattaccatgtctcaagaagcccctttgtgaaatattgtagcgacccttctgaaaacgaagataaagtaatgggacaatatctaaaatagtaaaggggtgagatatctaagtttaaagtagaaaatcaaattaaaaactgtaatggttggtacatcaattaggcttttcatcgatctatcatagctaaagtggctaatacaagaatattctaaaacatattaaaatcgagagagcatatattgacaaacaagggaggtgtggggaagagaatggaataaaaaaaaaggacaaagtaatatggttggtattcaatttatataaactaatcaacacatgtttaaacttatgtttcacacgttaatatgttttttcatagacatcttacacaagaatcaaccctattcaataaacggttcgacactaaatgtatattctcattgtgcaaaactttgaaccgtaatctattattttgtaagaataagttccgtatactaaattcaacttcagatagttttatataaaatttgaacccaaacacgnnnnnnnnnnnnnnnnnnnnnnnnnnnnnnnnnnnnnnnnnnnnnnnnnnnnnnnnnnnnnnnnnnnnnnnnnnnnnnnnnnnnnnnnnnnnnnnnnnnnnnnnnnnnnnnnnnnnnnnnnnnnnnnnnnnnnnnnnnnnnnnnnnnnnnnnnnnnnnnnnnnnnnnnnnnnnnnnnnnnnnnnnnnnnnnnnnnnnnnnnnnnnnnnnnnnnnnnnnnnnnnnnnnnnnnnnnnnnnnnnnnnnnnnnnnnnnnnnnnnnnnnnnnnnnnnnnnnnnnnnnnnnnnnnnnnnnnnnnnnnnnnnnnnnnnnnnnnnnnnnnnnnnnnnnnnnnnnnnnnnnnnnnnnnnnnnnnnnnnnnnnnnnnnnnnnnnnnnnnnnnnnnnnnnnnnnnnnnnnnnnnnnnnnnnnnnnnnnnnnnnnnnnnnnnnnnnnnnnnnnnnnnnnnnnnnnnnnnnnnnnnnnnnnnnnnnnnnnnnnnnnnnnnnnnnnnnnnnnnnnnnnnnnnnnnnnnnnnnnnnnnnnnnnnnnnnnnnnagaataaaaaacaggtatcaaaacaatttacatattttactcaatcgattgaactagatacttgggcctattctagaattctagaatttagattgcaaatttttttcagtccaaaggagtttaactttgtacgagtttcaagataaagccaaggcctattatcaattttcaattaaaaatctaagagactgatttaaaataacacaacaatgaattttagatttgcgtcctttgattttcttcaataacagaattatatcctggccatgagaaaagcagatacattttacaatgcaaaacacacacaagtggttgaaagatctcctaattatatataaaaatatcttgtttactaaaaaatatcaatcttactatttaagaaaaagagaatctaaatccattggaaaaccaccaccaataccgcccactgcgtaatgctcttggattccgtattcccttatttgtctcctcttcctttccatcctttttttcttcttcaaattggcattttgaaccatgccacagaagatttaaatcctctcatgttcttttcctaaattacgagataaaaagacaaaaataagtttaatagaccctactcacgtgataaataaattttcctatagttatttgtctttctagtttatactcacataaggaacatgaaagacccaaatggccaaatctgttgcaaagcacccgacattaacttgaatttccaaactccacatagccccaaattaaagtatttgaacctctaaattattattttttttaaaaaaaaattaatagttagttaggcacgcccttaaaaacggagttagcgacaagtttgtcatatttcccttaatttgtcatttagcatttttaaatgtgtaccaaaccaaccccgagagagagaaaatgaaaaatgtgaagggtcataatctttctacctgcactttattcaccacaaaaaatgccttccattcccccacaagccagtggttgtcacaacaacctctgaacaaactatccaactccacagaattgcaggtgaaaaggggggaatagatggtatgtattatatacttctcctgaaaatgtggggaaaactaaaatgtccaaaagaaagagaaaaaaattcaaacttcaagtagtttttagtcgtgtaatggctctgcagaagccgggaaggaatttgatgtagtatcatcttgtttggatgaatcttctgtagcagcttttgcatcagaatgctgaagcttgttgtcacttgataatttagaaggagatgtctcaggtgattgtacatttgataaccccctggtcagaggagtatcaagtacattcatagcaggtgaggtcaagccatagttctgcgggatagtcaaaactggatgatcaaatttgcatgttgggccaaacttgcacgttccatagattctgtaataatagcatacagcttgcccctgcagataaccaagataggaatcaggaatctaaatacttaaaaaaccatacatggtagccaatatgaactgtaaaattaccttcttaggattttagggaggacaatatgaagtttaagaataaacaatacatgttctgattttttccattgccatacaatcacaaactatcatgtatttcaagtccattgagttttataataattatcttaaaggtcgtatcttggattatttttcatggttgatggtgtaaaaacttttaaactaaccatgcatgtctattaaactcattggcatcaagtagaagctgaacttacaggtctcacaggaaggccgagtggatttattaatgattgagatattctttcctttgggtggtggaacttgcaatcggatccatatttgcaggtcccagtgctcataaagtatctacattctggttgatctggtctattcgggagagctgaattgattgcctgccaaccaaaaagtgactcacccagattcatgtagtcataaacaagattagatccaagtaaaccgttcggcattgcagggttcatatttccctattttgagaaacaaagtcacagtcaaaacaaaagatttcaatttgcagaaagtaccatgaactgcatgtactatgtagtaaccacaacccaacataattaattatcactaaaaggcgagatgctctgaagatttccttaagaacaaggcacattctgtatcagatattaattggtatatgtatgccaaatgtgcttggcaattaatgaaataaaatagatggaaagtgtaaggaataacagtatttccatacacagatcaattccctaaagttccttgcaatggtaacaatattttataatcttcatgcatttatttatctagacatatcagtcagacaacaaaattcacaatgcctccaagtaaagaactattgcctaacgcttcatgctgcgatccaaaactattatgtatggagtaacatttctgtaagacagcagaggagcagaatactatatcgaactccatctttttttccaaaaaattagcaaatctgtgtaacccttgcaatcattcatgaagagaaataataccactcagatcaaattcaatgacaggataaaccccgagcagaagagaaaaacaaagaccagagcaaacagcaaatgtatagatatacaggacattgaacacccttaactaaccatgtagttgttccagctctgcacaggtataacaccttgtgaagaagacagaaaaggaggcacatatgattgaaggccttgtccagataaatacggcattcttggtactgctgaccatgcaggaaaccctccagcatatggtaaacctgatgtaggaataattgttgaggtaggagtaggagatccaccagccaatgggtatgctccgagggaagcatgctgtggatgatgaaacttgcatgcaacaccaaacttacaagacccagttctcatgtaataggcacatgatttttcttcctaaacgagacatccaaagaatgttgaaaatttgcaatggtttctttcatcaacacagcaacagtaatcaattaaaaaaaatgctacaagtgcaaaagaatgcacaaacctgacgcatgggaagacctaaagtattgaatgacacgggagcagcacctcgcctatcctttggatgatgatatttacatgttgatccatacttgcacgtcccagtcttaagaaaatactgcaatgcatatttcaaaagagattacaagttactcaaattgaatagcactggaattgttaataaatctcccatgaagatggactctgtagcatacaaattttttcagattatactacagtttctgaatctgatatttatagtatagtagatgttaaacttaagttcatatacttatttcctttcctggtttaagtatgccatagctggcatcaaataaaattttgccatcatcatcataatgaaatctggtaaataagttctaaaggacaaaaaccacataatatgaccactaaaaataaaacaaatcatcaatagaaaacaaaatggtagcagttatacattgacagcataactactttatttttgtccagttcattaggtatcctacttcaatttggcattttctttcccttcatttattggtttgatatctgtgcactagtaatcactagctaaacatttcaaaaagaccagatttattgctaaaagggaccacaaaaaaggacaaacataaatgcaaaaaagcaagtaaagcttctgccagagtgacattgcaaaatatgaaacgcatatcttcttatggagtcttccacaaacacaagaaatgttacttttttattacaaaatctcccccaaaatttatgttaaagggaaacaaatatattttatttcactctaatattcttgcataaaacacatccccgatcagttttatgaagcataattctgttctgactcatgaaccaacaactatccaaagcttaagttgttaggtaaagacacatgaatggctttatattacatccctaataaaattcaacacaagaaaaatgtcacaaaaatacattttcattcatcaaaataaacatacctcgcaatcaggttgccctgccctctgagggagttcttcaccataatgagtaccctgaaaatctaataaagtatgagaaacttcaacaatttgtttgcatatgataaaactaataagcagattgaagattaagatacaatagaaacaaactaaaagattacaattacacaaactacatctttttgtcgaatatttggcaaaaagtgttgtttcatatatatatatatatatatatatatatatatatatatatatttatccagaagacaaagaatgaaaagtaaattaaagaagaagctcgtacagttgaaatatgagctgggtgatggtagcgacagctactcccataaccacacactccagtcctcaaataatataagcactcaggttcaccgtgtcgatctggatattgggtagattgagctgcagcatctctatcccaattatcattgattttcaaacgtcgaattgcttctacgatgcagatcaaaaccaatcaggcgaagtctgcccaaagtctcatttgaacaaattaatgcaacacaactaactagatcagaaacttaaaactttcacctcaaaaagcacactattgttgcctaagagattttaagatcaaaacatgcaggcgatccttagttgcatcattaaaaaaaagtgcatcaattatgtaaacccatgtatgatcaaacacaacacaacaccatagtttaggaagaaaaacacgaaacgagaaactaagccatgtttcccaaaaaaccctcataggtatctcacaatacattgtgtgaatcatgagaattctccaaatcaaaatcatcgtaccataaaaagaaaggcatgatatcataaatgaaacaaaaatcgttgagtaaaaaccatctaacatctaacattccctagcaaaacaacacaaagccatcatcaccaaacgatgatcggagccatttaaaccatgaatcatgacaaacaacaaaggaaaatcaatcaccagaaaaatctgcaccaccttcaatgttgtcaccagaatcagcattcctcggagcctgcctgctttccggcatctggtagagttgaaattataacaaaagactttttttttttttgcttgttcgatcaaacccaaaaaaccctttgagcctttaagaagaaatcagcgcacaacaatctcaaattaactcaccccacatggtaaaatgatcatcaggagaccgtgaaaattgaccaaagactaaaaaacaataaaactgaaataaaataaaataaaaaatcctggaaaactaaaatattaaaaacaaaacaaaggtacaaagcgagaatcacagataaaattgagaagaatcaaatgggaaatcttaaaaagagatttaataatattccaattggatgaaagttggcgtcacattcgattagagtttccttgctgtggttctgcaatcttcggaacattttggatctttgaatgtgaaacccgacaagttaatttataattactaataacgataattactatttggtgaatgattttatttttatccttaaattccattttaaatttcaattttttttctaatttatatatcaatttcctataacttttatatttttattttattttattgtttttattaactttattatttaaaaaatttaaagagtcatgtctctcttccccggcaataattattaatacgtacagtgtgtattcttgcgcgcgtgtacgaacaataaattctctgtaccatattaccctccacgtggctgctccataacatgtttacagagtttacgatatcctagatttattactgcccctacggcgcgtgcactgcaatcactactacaaatttggattgttaagaaaatttaattagcctgaaaaagtagatgccaattatggaattggtaagtggcattttaagtttttaacctcttgattttatctcacgagattaaccactttaattcctttcataaattgaggtctccatttttagcttcacattcaagcggtgataataattttgaaaagacaattaatatatgacaacaattaataataactattacatcaaatgattaaaaaaatctttcaaaaaacctaaattatcatgtaatattatcattcaagcgcgcaggaatcactactacataattatcataatcaaatattatcattataataataactatgaaaacgacaataatcataacaatcatgatgataataataattaatgataattttagagaaaaatcacgaaataattnnnnnnnnnnnnnnnnnnnnnnnnnnnnnnnnnnnnnnnnnnnnnnnnnnnnnnnnnnnnnnnnnnnnnnnnnnnnnnnnnnnnnnnnnnnnnnnnnnnnnnnnnnnnnnnnnnnnnnnnnnnnnnnnnnnnnnnnnnnnnnnnnnnnnnnnnnnnnnnnnnnnnnnnnnnnnnnnnnnnnnnnnnnnnnnnnnnnnnnnnnnnnnnnnnnnnnnnnnnnnnnnnnnnnnnnnnnnnnnnnnnnnnnnnnnnnnnnnnnnnnnnnnnnnnnnnnnnnnnnnnnnnnnnnnnnnnnnnnnnnnnnnnnnnnnnnnnnnnnnnnnnnnnnnnnnnnnnnnnnnnnnnnnnnnnnnnnnnnnnnnnnnnnnnnnnnnnnnnnnnnnnnnnnnnnnnnnnnnnnnnnnnnnnnnnnnnnnnnnnnnnnnnnnnnnnnnnnnnnnnnnnnnnnnnnnnnnnnnnnnnnnnnnnnnnnnnnnnnnnnnnnnnnnnnnnnnnnnnnnnnnnnnnnnnnnnnnnnnnnnnnnnnnnnnnnnnnnnnnnnnnnnnnnnnnnnnnnnnnnnnnnnnnnnnnnnnnnnnnnnnnnnnnnnnnnnnnnnnnnnnnnnnnnnnnnnnnnnnnnnnnnnnnnnnnnnnnnnnnnnnnnnnnnnnnnnnnnnnnnnnnnnnnnnnnnnnnnnnnnnnnnnnnnnnnnnnnnnnnnnnnnnnnnnnnnnnnnnnnnnnnnnnnnnnnnnnnnnnnnnnnnnnnnnnnnnnnnnnnnnnnnnnnnnnnnnnnnnnnnnnnnnnnnnnnnnnnnnnnnnnnnnnnnnnnnnnnnnnnnnnnnnnnnnnnnnnnnnnnnnnnnnnnnnnnnnnnnnnnnnnnnnnnnnnnnnnnnnnnnnnnnnnnnnnnnnnnnnnnnnnnnnnnnnnnnnnnnnnnnnnnnnnnnnnnnnnnnnnnnnnnnnnnnnnnnnnnnnnnnnnnnnnnnnnnnnnnnnnnnnnnnnnnnnnnnnnnnnnnnnnnnnnnnnnntctcgtattgtttgcaccacaatgctatttttctatataaaaaaaagtattattttttaaaagtaaatagtttataaagtaatcgtgtaaaacttttttgtattattgtccaaatacaaattaatattatataataaatttattaacttttattataattatagttattttcaaaaatagatctatcataatttttttattagttcacagtataaaacattttgtacttttacattaaactcgttttttaatatgaaggagccacaaagtatgacttttgagacacggagaacaaaaacatacaatattttattttgtaacgcactagcattatcacctgaataatgcacaagctattaacccaaaattggtaatttattttttaaaaacttttgatggttttaacgtaatctatcattttttttctggaaataatatatcctcataattaaaagtcatgatattaattattgagacataaaaatcatcaattggatttggtcttttttcataaaatattttcctgcctaatctatcatctaatgtatgtaagccgatattaaatattatacatagaaagcccgatattaaatatcaagtattaatattattattttaaatatattttnnnnnnnnnnatttttatctttaaccactaatactaaaatattatattaaaatctaatcaattcaaattaaattaataagagcaataaaatttctatcctaatttttagtataagtatgaatgggtgtggacatggataaaaataagtcagatgatctatcagagtctgtgttctaatatgtccaagttcaatgactgatttgtttattaaataggttagtcttaagttttctaaaaaaacctttttaactagacatgactaaacttttgacttcaaaaaaagtttttaaagcctgataaacaaatatatttatatatatatataagtatataatatttatatttaatatatattaatattatcattaataataagattttataaatttggttgtctatttaagtttgttgatttacttagtcgacaaaaaagtttttaaagcctgataaacaaatatatttaatatatattaatattatcattaatatatataagtatataatatttaagtttttgtgaacatgtgggcatgtgttttctttgttgacaaaaaagatatatttgtggagataacctaaaaaataatgaccattgttaggaggaaatattctactatctaaataaatttctgaaagaagtttaagaatttcgatgatcgattaaaatactcttttgcaataatgcagaacaaaacctaaaataaagaagtgagtgaccctattgggaataactcaagtcacacatcgactagaaatagtgccaagtcagagtatataagttgagaacaatcctcaccctatgagctagttttggggttgagttaggtcaaaacccacattctaatatggtatcagagcctatcctagattcattaacgggtcacccaccatgttattcacgtaccaagcccaaaaaatgctggacgtgagggagtgtattgggaataactcaagttccacatcggctagagatagtgccaagtcaaagtatataagtggagaacaatcctcaccctatgagctagcttttggggttgaattaggtcaaaatccacattctaatagacactaataaaaaaacagatttttgagtatttaaacttatatattataaaaacaaattaataattaacaaacaaataagatgaaacttgcataataattttgttattctttttatttattaataataacttagagactcctcaattcttttatagtaagataatcggtgttgagagtagtattaaataaataagttaaaacattttataatattataattcttttcatacatatattctttagactacaaacatttttgttggaaacaatcttacttaagttagatgtgaccactatagtaacttgtgcatatgtatatttagtcttaaaaaaaaatcatgatttttcgttttaatttctgggaaaaaaattagatttagttcttagatttaacaaaagaatatgattttatccttatttggttacgagagaaatggaatgggaggagaggaggagatgatggaaataatataactctagtgggagttagcatttcaaagtttattgaattatttcaaataacaaatatgatatgaaagataggaaagtgtaaaannnnnnnnnnnnnnnnnnnnnnnnnnnnnnnnnnnnnnnnnnnnnnnnnnnnnnnnnnnnnnnnnnnnnnnnnnnnnnnnnnnnnnnnnnnnnnnnnnnnnnnnnnnnnnnnnnnnnnnnnnnnnnnnnnnnnnnnnnnnnnnnnnnnnnnnnnnnnnnnnnnnnnnnnnnnnnnnnnnnnnnnnnnnnnnnnnnnnnnnnnnnnnnnnnnnnnnnnnnnnnnnnnnnnnnnnnnnnnnnnnnnnnnnnnnnnnnnnnnnnnnnnnnnnnnnnnnnnnnnnnnnnnnnnnnnnnnnnnnnnnnnnnnnnnnnnnnnnnnnnnnnnnnnnnnnnnnnnnnnnnnnnnnnnnnnnnnnnnnnnnnnnnnnnnnnnnnnnnnnnnnnnnnnnnnnnnnnnnnnnnnnnnnnnnnnnnnnnnnnnnnnnnnnnnnnnnnnnnnnnnnnnnnnnnnnnnnnnnnnnnnnnnnnnnnnnnnnnnnnnnnnnnnnnnnnnnnnnnnnnnnnnnnnnnnnnnnnnnnnnnnnnnnnnnnnnnnnnnnnnnnnnnnnnnnnnnnnnnnnnnnnnnnnnnnnnnnnnnnnnnnnnnnnnnnnnnnnnnnnttgtattatttctaacatatttttacttatatttttacccctctcccagtatcttcttctctattttttaaaaccaaatattaataattttcactttatttcttatctatttttgcttatttttcttattttcatttatcctatttctttcatttaccaaaaagagcattactcttttggtataaaactaaaagtattttgttttattaaatgtaagcactaaaaataaacaatttattaaaatacaaaatcatgatattttaaaaattaaaagcatgtttaatctttaattaaatataatttatcatttaataaaattactcctgttggattttattaaactataaaatgatcatttttattataattttttatttataaaaataatttattaaataatttataatatttcaaacatcttatttaactaattaaattataacaggtttgtaaactcattttatcttattggctacgtttcaagggacaatttgttgaaaagtaacattttcttacttttaaatcaacgtacttttgagggatggagaatgggtgggggggaaccaaacgcactattagacttcttggtattttattgcagtttacaaactatattatattgtatagaataaattgtgaaattgtatctgttgattcaaaagatcgaaagataaatttttgtaataattttagctaaaaaaattatcattaaaagttaataatcttttttaaaaatatgccctttgcttgcattttgacttttagattttgccgacgcccaacagttggtggtcaattttaacattttgtgttttggttaaacccacatattcgttggcaggaaggacacttcatatagttcagacattgccataatcatgcattcaccaaaaacaaacaaaatcaaatgtattaattaagagaaatgttagtactatgttatatgatacttttttcctaagattctttttatatgataagataattttttttgaaaaattataattttttataagttttatttgttatttgatgatttttcctgatttatattaaataagattttctttttatcaaaattaataattttttataaattataaccaatcatataaaaagttttggagaaaaagtgtcataaagaatgtcactaataatcctcattaattaattattaaagaaaaataaaatagaagacgtcaattttctttctgttaatgagaggagattttggaagatcttgaccgtccagttgcgaggaagaggacttcgccttctgattcaagttatgtacgatgcattcgtgtaaaactgtgaaataatctagggttgaaaagtcatttcacacagtgccataaggcatataaacccagaatgcagcattgacgtatcggtgttgcgaaaaatcgtcgccgttaaagtgatatagaaagctaagcttggatacgcggcacgtggaaatgaatcagccattgattgcaaaagtcagtggtaggcccatcgtttcttcatgtcggcaattgtattttgatttaaattcttaaatggatgaagcatgcgattttgcatcatcaatacacatatgatgtaataataaattaataataatcaatcattaatatttttcattaaatatttattttcttataactatcagattatatcagtaccaaaaaaatacaagcatttattatataatctcaattgtaacttcactatttctatatcagttaatatgatattttttcaattaatgcatgattttttcagtttaattaataatttaaaatttaaatattatttaaattaaatatttagaaaaaatattacttataataattctaacctattggaataagattgttttcggtagaaaatatctgtatctttattaaaacattacaattcgacaacaatataagaaaatattacattgtatttaattaatgctatatatacaaattagtaaaagcatttaaaataatgataaatgtattactcgttttttcatgttctccttgggataaaaaggcttcatggtcgtgaatcaaaacggcttacaacaaagtggacgaggatttcgtgaagggaaacactagaattagtggggctagatagaaaccttacatatttaattaaccaatgcatatgctcggttattatggttataaatatgattggctctctctcaacaaaattctgcctttcaagaggaattatataaggggatcaaatgatcatacataggtctatttgtttgggctagcaaggaaactagaaagaataagctactatatactgaagatggggttgcctctaatgattagcgtggtccaaatttatcccaattgttttttttttttnnnnnnnnnnnnnnnnnnnnnnnnnnnnnnnnnnnnnnnnnnnnnnnnnnnnnnnnnnnnnnnnnnnnnnnnnnnnnnnnnnnnnnnnnnnnnnnnnnnnnnnnnnnnnnnnnnnnnnnnnnnnnnnnnnnnnnnnnnnnnnnnnnnnnnnnnnnnnnnnnnnnnnnnnnnnnnnnnnnnnnnnnnnnnnnnnnnnnnnnnnnnnnnnnnnnnnnnnnnnnnnnnnnnnnnnnnnnnnnnnnnnnnnnnnnnnnnnnnnnnnnnnnnnnnnnnnnnnnnnnnnnnnnnnnnnnnnnnnnnnnnnnnnnnnnnnnnnnnnnnnnnnnnnnnnnnnnnnnnnnnnnnnnnnnnnnnnnnnnnnnnnnnnnnnnnnnnnnnnnnnnnnnnnnnnnnnnnnnnnnnnnnnnnnnnnnnnnnnnnnnnnnnnnnnnnnnnnnnnnnnnnnnnnnnnnnnnnnnnnnnnnnnnnnnnnnnnnnnnnnnnnnnnnnnnnnnnnnnnnnnnnnnnnnnnnnnnnnnnnnnnnnnnnnnnnnnnnnnnnnnnnnnnnnnnnnnnnnnnnnnnnnnnnnnnnnnnnnnnnnnnnnnnnnnnnnnnnnnnnnnnnnnnnnnnnnnnnnnnnnnnnnnnnnnnnnnnnnnnnnnnnnnnnnnnnnnnnnnnnnnnnnntttttctcaaactaattcaagaaaaaaataataaattattttataaaattaattcaattaattaaattatttttataaatttgattcgattaacttaactaattctcatttgaatattttttatttgaaaaaaatagtttaaaaatcactttgagactaatctaatttttagaactaatttaaaactagttaaaaattaatttagttcagaattaattttttaaaactagttcgattctgaaccagtttcaaaatcaatttgattgtttgaatacaaaattaaatcggttaaaacagtttaaaatcagttggatttttgttttttttacacccctatccttgtgggagtaggcatcaaccaacaagcacacgtcattaacaacattcttcaccatttttgttcatcctctattaagagagttaggttgcctacatataaagttttgcatgcatgttctcaaataatgtgagccagcatgaaacaattgttgttaatgtgtgtattgatcaccaatgatataggtcaatattttgggagttcatatccttcatttcttttttaattgacagtttaaaaagtttactattgaaaagtcaaagcctcatcctttgttggcaagacaatacaattgcttaatccctcttatgagggttcccgaaaatatcatgcaaactatatatatatatatatatatatatatatatatatatatataagattcctataagtatctgtcaatcatgagagaacatttgtaaacttgaggagagtgcagctcttggatatagaaacgtaaaactaaaaactcttccatcgtgtcttggaaactttctcacaaatgatgaaggtaggcatagaattggatgtcttttccccatatgccatcttttgcgtgattgtgaagatgttgcagccttgcggaccagccttaatgcttctcagcaatgtagctcattctttactgcgtcggtttagatgcttgattgtccaaaatctacgaagagagtatcttatataaactataaaaagtgactcaatttaattatgttaagttaaattcgttatcgttaactgtgtgtatttggtttcatgttataaaatttattttaaatttataattaatattaaatatatttttatacgtatgattttatatcaaaaaatagttcaaaattagttttagatctaaatttgattataaatttaaataactttaaaaaaatttatgttagatacaaaattttgtattgaattttatttttgacttagttttacaaaaaagactacaaatatttaaacataaattacgctatttcaaaattaatttaaccaaaattaatttttccaaacactgttcaaactcactttcttatgtgacacgtttttacgcatacggaccgacagtcattttggtccttatgatgcttaaccttaatcactttactgacatttaaatttaattattatttgttgttattttaataattaaaattaattatttattattattttgatctttaataatatttttaaaatgaatatttatttattaagagattctagttcatttaattggatagaatgtataaattattataaatcttctaacattatttttaatttatatgaataaaaaatagatatttaacctaaacttgacattataaaattaaattttaattttatttaattaataaattttaaattgagattttagattaatttttggtggattttataatatcagataggatttaagaatttttaattttttttatttttttttatgatagatcttattttatcatattagaaaaaaaagaaaagaaaaaaattattattttttaaataatatatatatatatatattttaaaaaaatctacaaaaatctatctcttttatttagatatttaataaaaataagatgttaaacttgagatttctatagtggaatggaggaagtaggattgttgaacgaaatgatgtggtagtgaatgaaagtgggtcccagtggaaaagtgggcagtgaggcgcgaagaaggaggcaggaggcgacgtagctttcagtctcacagcagacaatgtaagatttggtggttctgcgctacgtgggagcaatagaagactgaaacgtgtcctcgatatgtaaagttgaatcaggtgttcttcagcaacagtaaaaagatgaatgccactgtaactccaatctttttgcccaactcaacaaactttatgatctacactgtagagtagactagtccatagactagcttcttccatgtgtcgcacttcaagattgccacgattaacgatgcaccattccatttttttatatcttatccttctttccatagaaatatatatttattcatttcgtacaattcaattcataattatacgtttaagttggttaagtttatgagacacaatttagtttactctccatataatatactttttaggaaaaattatcaattttaaatttgattcaatttggattaagaattagtctcataataaattcaaatgattgaagcttataaaaatattctgaaatatcactaaaacacctaaggtcagtggtgccaaataaaaaaaaatatttacttcatttcattttaaattaaataaatggtgaacactaaactatatttggattcctcaaatgcattaaattaatatattggagtaaaattttctaaaaattaaaaagctaagcgtaaaaacatgtaaggaattgaaaaataagcatgtggaggattttatttttagataaattcagtacatgtttaaaaattaggtggaaaaatacttttatacaaaaggattaaaatccatatttttatttttatcttataaattatattgaaataccaatgatacacttccatgactcaattgaaagtgctttagccgtacgtcttggttttttttttttagctaaagggaaactataaagtataaataattaatgatgtttttcttcggtgctcgaaggttgaagttagatactactgttactgtaacacgcacgcacacacacaggaccacggaagtcaaatagaaattacaaaatttcgtttgaatatttgtattctttacttttataatttcaatcctttattaattcgctatttagtggatggttgcaaaccgagtctatactaaaaataaatagaaaccgacatggagactcttatacgacaagcatgataaacaataagttagttcttattatttatttgattcaaagaatgcagttcacaatgggtcaaggaacctgctgatgcaaactaatgaaacattaaggtcaagtaaattagcagcattttcaagcaggaggtaaaatgtcacattcacgagtgtatagtattcttctatgatttgccattaatttatacgttactaataattatttaaagagtttaatcgtgatagcataaaattgtattatattgtcactaatcacatattattgttgaaatgatatgaattttaaaataattattaaaaaagttaataaatttactatgattaaatgtcactataaagtaattttatactattattactaattttttttactctcttatctaaaaagttttaatattctaattttctaaaattaaaatagctttataacctactatcttttgccaatcctagctagagatgcctctctcactccaaaagtaagtgtacattacatagttaaccaaaggggagcacctaatcatttttagttcactactgaaattcattctaaatgttgttgctatgttgaaaaggagataaagattggttgacatctacaagggtgtgtatacacgtgctagaggtaaataaaaataaatattgtgaatgatgtgatgaaaaatacgagacataaagatatatggtatatgcaaagtttaggggtataactgtattatatataagaaaataactttgttgcaaaagaagttgattttctacaaactgctttatttccggctgtaaacacctttctcgccacatattttacaaacatttcttagtttctcagtcctcacctttccagccagaaaacgtgattgcaatttttttttttattagaaggattttgaatctttttataaacatactgatgatcaaagcaaaaagagtgtgtttgtttaggtacacattgaatgagagtaaaggaaatggaaatgaaagaaatgaatatttttaacttcttgaattggatcttttggaagtgaccagttgtcgattatttttttaatgaaaaaataattttcccttaaaatatttcacatggttgtttgtatcacaaataagagaatattagattaatatacttttttcttttcctccaattcaatattggaaacaacacttaattaaaaacgaaccataaatgaattaactataatttctaacttttggtaatacgttctcaaatagaatacccatgattctcttcctcataatatccgatattggaatccagaaagaaattatgtaaagagatttattttcattcccattagacaaccatcaaatgaggtcaaacaaggaataaaattcgacataagaattttcaatgtatcaagcaaaggtagatatggtcaaatagtcaatgaaaggtagatatatattccacacttgaggaaattccctagtccatgcactcgagtaacttgcatatgttcacttcataagaaaatgtagcaataaacttgaacctacaataatattttaaaagtgtgtttgaataaatttccttataagaatttattggagaagaaaatacgaaagaaaaataaattaattttttttttacaatttaaaattaatttatgcataacttaaaattcaaacataccgtgagtaatgtttaatttaattaattactatagtattgcttaagaaaatacttttttcctcaacaggtagataatactttttagtgtagtttatagtcgtagcattgctaatgcaatctagttggaatcacgtgtgctttgatctagtttttacatgtcctctttttgcttaaaacaaatttaatcagctgaaaagaatttgttcacctttgactatgaaggaggaaaccattaatatcaataccatgaaaattacacttaaagtactagccggcttcaaatcaccaatatgcttaccattacgaaggagtagcttgtatgcaataaactttgaataacatttcaaccaaaagtaatgaactttgaatgacatacatgtaatgtaaattgtaaccacaaacttgaagtagaatatgtgcatgatgagtagtaatagtcattgactttgaaggcctggtggggtcatggaattataaaagctcccggcggcgtcctcgatggtcaaactttgccctagaaatccaaaggcttagcaaaatcaacaacttggtcatgaccaatcttagtgaaagagaaaggcattcactgttcatggaaaagtgtcaccattgagaataagacgagtatattttgcaagtatttttgattaatctttcggcactaaaactattgatgtttaaggttaatacacatatcttaataaatatgaatagtactaagaaattttatatttagtctaaaatgcaatcatttaataatttttttgaatataattatatttttgagtaattataatttagtttaatatgttattttcttatgtctagtatggtaaaaggaaaagtaaaagagaaagctttaaggtgtgtttggtttggtagacggaaacaacagccggacgacagaaatgggggaagggagtttggtgtgtgtgattttgatagaaattaagttccggtgtattaaattttctattcattaaacaactttataatatatttttttttaaaacaaacaacataacatattattttatttctattttttaatatctcttctattttcgtttattctatttttctcttctaaaactctgagatatgaaaaaataataaacaaataaaaaaaagaagcaagagaaaagcacatgacgagtacaaacaaaatggagattgctaacactagagtccaactactcaacgctcttgaaaataggcccaaccaaatggtccacatattaggctacgttcaacaatcaaaggggtatcccaaatagagtttataaatcaaggagaagattttcaaattaattcaatgagtaaagcagttgcaaaattcatagtgaagaaaaatttaaaactgaagtagtttctataactgcttgaaagaccatcagcttataaaagaaaacttaaaatacagtcaaataaacaaaaaaacctgaaaacggaccaacggttttaaattatacattattaagttaatatatgcaataatatataacctcgtgatttcttgaatgagtcatgaatatatttacattgcgaattttttttgtaaaagaagcataagccaacattaagaaaatagcaaactgaagcaaaaactacatagattttagacattcccatccaacacacaagtgtatatatatatatatatatatatatatacacacacacttatggaagttttcaaatcacacttgttctttatctacctttgtatccattttcatgtcataaagtaattttttaacacgtacagtgctcaatggcaagtaaagtaaccactcctactatactaaattccttattaaaaaaggatttaccacttagcagaaaacaaaccaaaacatcattgcaacttgaaatatgaacaataaatattcaaataagattttaggccaaattcaactgcactggagaacagataatgcgcatccatgacctggtacttctgctgagaacatattatttgttcgtatggttcttccactccacatttcatttccagaacaaagtataaactttcttctacctggatgcactatagccaagtcttttatgcttgcagatattgttgttttctcgttactcagattgaaaaatgcaacataggtctcccctgaacggaagcaaaagcaacaacatggagaattagaggatagtgcactataagaaatcatggttaattaactgtgccatgttattttagttcatctcaatttggtagtaaagaaataaaggattaaattagaaaatagagaaatatcaaaccttttcttccagttgcaatccaagatcgaatccgattaggataaccttcagctgcatgattggtgaagttgcattactagataacaacataaataaactagaaatagcattaatgattctgcatagagataactttttgttactaatttttacctagggcatgttctactattgcacacatgccagaatgaccattaactagagtcccattagatttcaacttccatatctgttcagattggatagatgtctgctttctgcatcagcagcaatgtaatatggtttagtacaaataacaagaacatatctagacaaataaattggagaaattacgatgattttacaatgatgccgtggggagttctctcttgtgcacacagaaaggttcctcctgatcatgctttggactcttgtaacaaattctttcaagatcttggtaatatttttcactagaccatccatatgcttttggatcagtgcattcaatgagagccatggagtaagtaaactgtacttttgtgacattgtgtcttttagtctttacatcatttaatcttgtgatatgagaaaactatatagcaaaaaaggcagaaataatgcaaatctcatatttaagcgtctgtttgggtgtaagtttctctataagcacttctaaaaaaaagaaaaaaatgaaataagtttatccataaactataataaattttccattaaagtatgtttggatgaagtattttaaaatttcaggaaatttaaaattcagggaaattaaaatgcatcaattaaaattcttttattttttaaattttgtgtttagataacgaaattaaatttctttatttttaaaattttgtgttcagataaaaaaattgaatttcttcatttttaaaattttgaacctcatgcacggagaggcgcgtgagatgggtgtcgtgggagtagcggaggtcggagtattcaccgacgatggagacggaacaaagagtggtgcgattagagtttctatagaagaagagaatttcaatttctcaccttttagaaggaaattcaaattccacatttttagttatttaaaattctgttttaaaatttcaaaaatttaaattcttcatataaaaatatccaaacaatgaattttaaattaaagaattttaaattcgcttgataaattactttttctaattaaaattctctatccaaacatactcttagttaatttgtagatgtcatctcatcttttagagaagctatgttggtggacttctaaaaattagctaattgagagcttatttttgcttatggaaaaatttatctcattttttcttcttattttcttcttttagaagtgcttctagagaagtttacccaaacagacctacctaacatatggttaccaaaagaaaaagcaagaagaaagagaagtttcacatgcctcttgattatttgagctaaaagagtttatctccaatatggtaggatttttgataagatcataggtccatgcatcaatctaccgtagatcccctccatacataatgggagactttgccttacaccacaaagtcatctatgagatgagagtaacttcacttagaatctattgatttacatgggtatatgtcctctccaatttatagtaatgcaattcagttgtgtgtttgtgcatcagtgcatatgtaccttagttctttgctcatcttgagtaagcctagtaatcctgtatgaaccttcatgaacatctatcgagaaaaaaaaaccataaaaaaacataaaaataaagttttattctttatattcctaaacatctcaaattcaaacaaactcgttgcaattatgtatatgtacgatgtatagggatgaaactgaaaaaatatttttcttttttctaatgatttagaaagtaaaaggcatactttttttggtgaaaaaaaatacggaatatggtggctactctattcagtgactaaagcaacacaaatcaaacataaattaaaacattagaagctaagtgttctgaaccttacctactgaaccaaccccattggaactcggtaggaaaatggcatattttttaaaagtattatgcattggatgtaaattgggaactgtttagaataccttaactatcttggtcctaataaattaaggaaaaaagtagtaatgcaggggcatttaggctaacctggatcagttagccatccaaatggtagcatgtccaaatcaggtcaagattttccctttaaaccttttcctcctattaaattagatgcagcgaaatctctgaaagagtgaaagacaaatcagagatgtagataatttgaaggtagagtagcagaagaaaggtggaagggcactccacatattttgatatcaaacataggaaggatttaattaatgaccttactatattaaaatgagctacaattgctgaccattcatcccaatcatctcctgttacacggtatgtgttaactagattactaaccatcttagccatttgtggtgttgcactgactccaggagacagagaaagtacaatgcgtttgttaagtccatcgagaatctgcatagatggtaactcaaatgatgactaagttttccatgtattacctttaaaatgaaaaggcagaaaggggtgtgaattttgcagtaaacctctgatacagatgttatttcacccaaatccaagttattaccaaatacacagtcaagtttcactgtaagaaatcaaagcagaaaatttataaaaatgtgtcaaagctggaagtaaaatatacccacaattgcttattgcttatttaaaaacattatgattgaggtctaacgtaagaaatgaatgtattgcatattttgcaatagtagatgataagaagaatatacattagtagtgtgaataccaaaatcaactcctcatgaagcatacagctcatagattgatcttaagaaggcttttcgagctcctgtttttgtatttatagccatgaaaccgttactcatccatttacaagcccttgatgggattcctatgtctcttgctttccatactcgaccagataccatgtaaggttgtccctagcaaggtgcaagaacacaaaaataagttcaagaaaaaataacgggtatgcagttcaccaatagcctctattttcgagcaaatatatgcatttccttgcttcttatctatagataataaactcactttacagcatgattactcttattatattttcttcttctggtaattattttttgagttaccatgttatttatgtaaagtattcatccgctttatagatgattaacttctgtcgattacctattgaccaacttatgtgaaatatctttttaaccatgtttttttcaccaataagattcaaccccaaccttgcttgaaggatctaacaacatgttacttgtaatacattttttaactatataaatttcacctttattttttatcaatctatattgaaggaattagaaaatgtaccgtttgtgtatcaagtattggtgtgttgttattgaatgcctgtgtactgattccagccataagatgaatcccaaacttcaaacccgtactatgtactttattacctacatcagtgaaccctctccctcctcttgaagaaggccatctttcagggtcagggagcattcgtccccatttatcaatcacatcaaaaccaaaagaatttctatcaccctttagactcctataccagaggtaatccacaacagcatactgcattgtttcaaaggaaatattttatatatatgcatatatttaattactaacatattcaatagcagtagtccaatacagtacctgatatccatgagcaagtaaccactgagaaaatatattacattctgtaagtattcttcttcagaaattatccagttaaagctatcataggagttccagcctcttggaggcatgatagtattttatgatgacacactgatatcaacaaccatgaggtcaaatattcattgtttgcttgcatagttgaatatataccaataaatttcgtaaaaaggatattacgaaatagatatgaagactcagaaataacatcatgttggtcagtgtttacgtatgtgtaattcctctcatgactaatgagtaatgataatgaatgaccaaataacagaacaaggttgcaacataaaaagtggtgtccaaaagatcatggaactctctttttagtttatttaagatttaagacgacggattaatattttttttttcctactctaattaatagtcatatttttcaataaaatgccgtgaactaacaaactaattaaacaaagagagattcctatatctagctaattacttttttcttcatatataatgtttatttttaatttgatctctgcaaaaaaatggtctatatgtatataattattttcaattccatcgtcaccagttgttattataacattgctagattggtatggaaatataagaagcgaattttttataacatttatttttattttagttataatactttgttgcgttttaaccccaatacaaggtgttttgaaaatggttgtatgcatgtgagtgtgtgtactactaaacagataataaacttgtctaaacgaagaacatgagaaaataaaatgattcctttagtaggaaaatatattttattttcatttctatttttttttattaagaaatataagagacgtgtcattttattttttattttaaaagatttatacaaaaattaatcataattgatttctgtcgcttcttttacaaatttaaatttaaaaaagtaatcttttcataattatcaataaaaaaatctcaaattgaccggagcctaatttttttcccttgtcattacataagataaaagaaatagttaaaataaactgattaattaagttcctctgtatagaacaaaaacaacaatacgttttttttttcttctccgataaacaaatagtaagaatacacagattaagtcctcctcattataaaacaaaaacaaacttgttcaaaactaaacatacccattattgcaatgtttttttctctgtcttcaagaaaacatatatgcatctgaaaatcaattattgaaaccaaaagcaagagaatatgatgctgaaataccttcgaattgcacaaagacaaagaaggaagcaaacagaggtaactgagatgcacttcatggttgcagctaactctattccaaccatcaattatgattcttaacaggggattctagtatatataaacattgcctttgcctttgtgcaagcaaaatagaagttcatgttccttttatttgattcataacgagtttgtactagttgcgggccccgactcacatacaccactacattttgagtaacgaaggaagcatcaagtctatcttgattcatgctagaggacatgtaattttttttaatagacagatcataaaattttagctattttttttataaatacgcatgcatgataagactaaggaagtgaatcaatgagccttaatttctttatccccaccttaatatatatggaaattttatgcgacaagagaattgcattagttatgctttggatcactcaagataaagaaattagaaagtgttggcaaatttaaatgaacaacgactttccacctttgattcgttaattcggattactctccactgaaaattacttagtatcaattctattatttgaaaaattaaaaaatgacattttatgtaatgagttctgctatatggtacgaaatcttaaaccacgaaatgcacgaaacactgaaaacagatcatgtgtaattatcttataagaaaataaattaaaatgttcaaaaattaagtaatactgaaacagaaacatcgtttataactaaatcccgttaatcctgaaaattaccgcaccaaatttgaaataaacaaaagtcaaataataattgctccaccgaaattcaagttgtgaacgtgttgcaacaagaaggcttatatgttgtaaaggttattgggtttaaacgtgttgtgcctttgatatcaaaatggctaattatcttcaaaaataaaataaaattggtgcaatgcttatctttgatttggatagtagtacatttgatgtcttgatattaacaaccgctgagacgtttggaattaaaatcatagaaaacatgaagtccatgtccttcatgtgtttagtacgaatttttattcgtactcaacaacattttccttatgtaatactgtatataattgtttttcctacatatttttcattttttatacagacatctcaaaattagaatacactcaaaataaaaaggaattgcatttttttttaaatagattgattaaatataacgactacaatttcttgcccataatagatcactcatattcacttatcactgtggtcttatttattttcttatttgttttgaaaaagagtttgtttnnnnnnnnnnnnnnnnnnnnnnnnnnnnnnnnnnnnnnnnnnnnnnnnnnnnnnnnnnnnnnnnnnnnnnnnnnnnnnnnnnnnnnnnnnnnnnnnnnnnnnnnnnnnnnnnnnnnnnnnnnnnnnnnnnnnnnnnnnnnnnnnnnnnnnnnnnnnnnnnnnnnnnnnnnnnnnnnnnnnnnnnnnnnnnnnnnnnnnnnnnnnnnnnnnnnnnnnnnnnnnnnnnnnnnnnnnnnnnnnnnnnnnnnnnnnnnnnnnnnnnnnnnnnnnnnnnnnnnnnnnnnnnnnnnnnnnnnnnnnnnnnnnnnnnnnnnnnnnnnnnnnnnnnnnnnnnnnnnnnnnnnnnnnnnnnnnnnnnnnnnnnnnnaatttttgttaaaaatttattattacatgcaaaatattcattaattttattaataattaataaatttaacttatcacttttaatacttatattttcttaacaacattttttccatctgaaaaattcaaattcagaaatttatttagaaaatacaatttggctaaacaaataaatgttcaatatgttacgtgtgaatcaattaatgtaaattgatttaacttaatcaataattttacaacaattatactaactgtattaaatatttaatagaagaactttaacactggtaatactaataattgtgtgaaagtttgaacagccatacctcttatttagaagtatagctttaaagtctttaacacatatattatatagcaatttttccaagtttaaatgggattgtcttggtaaattatacgtgtgatttgtaacaaaaatatataaaaaaaaatgttaatatattccttgacactagaggttggtgttgtgtgacgtggcttatagcatcatgctgcaagagtatcagtcacgtggagttctctcgccctcccatcacttcagtcgtgggccccacgctctttctccctccctcaaatctcaaagaggaagagccacacgctgtgccccttctctctctctctctccaaaatcccaaaaccgaagcaaaaaccgccttcacattcacaaccacacctccgcgatataaaaaaggtaacctccctcagtccctcgctcatggaagagctctccgcggggcctctcgtccccgccgtcgtgaaaccggaagcgtccaaaggcgccgcccccgacacagacgcttccgccgcggcctccggcggcatgttcccggcctccgcgtcggagccggacaaggacttcctctgcccgatttgcatgcagatcatcaaggacgcgttcctcaccgcgtgcggccacagcttctgctacatgtgcatcatcacgcacctccgcaacaagagcgattgcccttgctgcggccactacctcaccaacaccaacctcttccctaacttcttgctcgacaaggttcgccttcctttgctctcatcatcatcatctccatttattttactattccacaatgctccttttgcagtaaaacttgaattcagttcttgcttctgaatttttcgtaaacgctgcgtttaatagaacagtcgtttagtttttgtggaatgtatgtagcgaatgaatgctgtttcgattctctagatctttgttttcgcactgtaattagtaactgccccttcttgcaatgttgctgacttaaacgtcatagtttttagagtgtgtgctttgctctaatagttcttatgcgattccgcaatgctcgttttgcagtaaaacatgaattcaattttcacttgcgagttttgtttagtttttgtggagtgtgtgtggcgtatgaatgctgtttcgagtctcagatctttcttttggcactcgtaactgctaattgctccttgcaatgctgctgacttaaatgtagtagtttttagtgagagattcgagcatgatttttatcttggaaatgcagcttattgttatacggtttctgtatcacatttgtagctactgaagaagacttctgtgcgtcaaatatcaaaaaccgcttcacctttggaacatttccggcaggcattgcaaaaggttggttgtgctctcgctttctcttgattaaaatttgtctattggtagccatgttaattgtgcaatagtaagaggtctttgttgcatcttactttttatgttctgttatattatgaatataagtctagaggaaagtttatagtatgtttataaatttcttttttggactatctaataacatagtagcatatggaagaggattagagggtaactggagctggttttaacattcgttatgttatacaattcttgcatatttattgtatacgccactagatcaaggaccaaattatcggttttaactcttgtcattttattgtctaatattatattttatgtaagggttttaatcaagttgtggattcagttgtatattggttttactggaattcatactactttagtatattgaggatcactctattgtcacatatttccgtttcacgtgaaactgtggatctgtgttgactgttgatgctatttagtctgtgattcctttttctgtttttaatgttttgagttttggtacagggttgtgatgtgtcaattaaggagctagacacccttttgtcacttcttgctgagaagaaaagaaaaatggaacaagaagaagctgagagaaatatgcaaatattgttagacttcttgcattgcttacgcaagcaaaaagttgatgatttgaaggaggtgtgcttgctgcaatctctctctccctctactctaaactattgctaagtagctaatgtttccctttttttttctttcctctgtttgcagtagttggtcattatttactactgatttccatgttacatttatttttacttattgcaacaattggtgtttcatactttcatttgtaggtacaaactgatctccagtttgtaaaagaggacattaatgctgtggagaaacatagaatggatttgtatcgtgcacgggacaggtactctgtaaaattacggatgcttgatgattctggtggaagaaaatcatggcattcatcaatggacaagaacaacagtggccttatatctagccctctaaatcttcgtggagggttgtcatcaggaagtcatactaagaaaaatgatggaaagtcccaaattagctctcacgggcatggagttcagagaagggatgccatcactggatccgattcacaatatataaatcaatcgggtctttctctagttagaaagaagagggtgcatacacaggttttcttggtttaaatttccatgtttgaaattttatatttctattttatttctaagtgtattggtttggaaattttaatgtctttttggaaaagctttttgtcatagaagataattttgtttcatgccaggaaaagcaattgtagttctggaataagtttaaaaatttctacttaggaatttttctaaaaattgaaattaatttatattttttagggaatccttatttatacctgcataagtagttctgcactttttcatacactaatccctttcaattgtgcatttaatacttttgaagtattaccggttaatcaacacattttgagctaagacacttccttttttatttatttatttattttgtggtcattttatgttgccacaagcttcaggattcatgtggctatagcacatcttaggagagacttagacttaaatcccaagctaaaataagttagtggacataagaaaaggtagaaaatcctggttttttaattttttaagctgtatgttaggtagtgatttgggatggctgtggacagcaactttattgtttgagcaaaggcaaggaaaaatataaaaatgaatagtttaaaaaaacatgtatgtgacattatacacaaaagtagttaccactagatcaacacagctatgtactcaccatagtatgtatgtatgtaatcactaatatctgacattattaagaaaagtagttactactgtattaacaaaagatatctaaccctatcctagggttccagggcttcctgctttttgaatctctctttgaagttctttcatctctccttgaatcctgttgtccctcctttgaatcttgcggttctttttttcaaggagggacaaaaggatttcaaggagagatacaaggatttcaaagagagatgaaacgattcaaaagttgcaggaggcactggaaccctgagttagggttagttttcttttgttagtacagtgataactacttttcttaataatgtcagatattaatgatttcatacatactgtggtgagtacatagctgtgttgatacagtggtaactaattttgtgtataatgttagatacatgtttctttagaaacacttctaaaagaagaagaaaaaaatgaaatgagctttttcttaagctaaagttagcaaatttgtagaagatctctcatatagcttctctaaaagatgagatgatatctacaaattagctaacagttatctaatggagagctaattttagcttatgcagaagttcatttttttcttctcctagaagtgcttttagagaagcttacccgaataggcccattgaggcaagctaaatgtgttatgaaattctcattgagttgtgtatttaatacattaaggacattgtctctttaaaacccttgcaggcttagtttctgccactataattaaaattaactaattaagacacaaatatcaatatatcataataaaatttcttgtgacccaaagttacaattgaatccctattagaatgaatatcttatcaatcatagaaactacaaattaactatgaaacaaaaaatgccttaaaaaaattagctgagtagcagatgccatattgcttatgaaaaacaagacttgtatcaaaactagattctgtttttttatttttctttgtttttatgttttatttattattgtcttgtaatttaagtctgaattttgtaaagaaattttggcatatgccatatgctggcttttattttttctgtcactgagtttgcatctataaacttggtttattttgtcctctctgactcctgtttgattcccttcctttgctccagttcaatgacctacaagaatgttacctacaaaagcgacgacatgccgctgataggccccatagccaacaagaaagagatataaatctcataagtcgagaaggttatactgctggtcttgaagattttcagtcagtcttggcaactttcacacgctacaggtatagttgtcagtctttttctgccatttcaaatatccattcaaatatttttaggacatgggggtattttcccggaagaatgaatgggagtcaaattagctaggaaccgttagactgtatgaggaggttcaattagatgaataggggaaaataaggtcgaaaggaggcatttaggaaattgtattttatattaactgatcaagctctccttgctctgttcaattttagtctataaataatcattcttttcttttatccctttccattgggattcttaacagacttacaggtaatagtgtcagttattatttttttgagtaagcaatatacagttatctctaaccttttttcttcatttgaaacagccgattgagagtcattgcagaactaagacatggggatatatttcattcagcaaatatagtgtcaaggtgagtttgttgaaattgctcataacacttggtattcatctcttgcattttgatgttttttatcatagttatttttataaaaaaactaatcaatgtttttgttccaacctatcgtcagttacattatggttggcataactcatagagccatgctatgggtgaataatggtatttttataatttagtattttagttggtaatctgtgacttcgcaatattataataatgatgattgctttgattctaatagttgggatgaaaggtttttactttattttattgaatattgatacagtttggatgcaaagggattttaacatatatttacacacagggttgttattaacttgaatagtttatgttcttcatcatcattttcagtttgtcattgtgcccccaataaaatctagtgttgttaagatgcttaattagctgaatagtttctcaatacacaaatcaagactctttgtgcaaaatcccttgaagatcagtacaccaacatccctactatgacttgtctgcctgtctagatacaagttttagtggaacagttaaaacaatgggtttgctatttcctgaatgaaattatatttatgttcttggtgtgcaatattccagatgtagtttgtgtcatgggtatttgttcaaatcttttgacgtaaaatttagtctataatggccttgttaccatattgatgtttataaagttttaggtcttgatctactggtacagtgttagaacagttacatatggatcatgttggtacgaaattcctgttcatatatgtacacattttattctagagatagattatgtggaaataatgtactaggtactttgacatgacggacaagtttttatttagtaagttgatatcctttttcttgatactattgttttaatatgaagaagttagacagagtaagctgtatcattgaattaaagtggtcatgtcacatttatattttagtatttaaattttccgaattcgtggatttaacatgtatattgcactttgcagcatagagtttgaccgagatgatgatttctttgctactgctggagtttcccggcgcatcaaagtttttgacttttctgctgtaagatggatgaccttttacttctattactacttttaatatcattttttatttcttctcttttgattgttaacatttttgtaatactgtgctttttatagattctgtcaatgaatgtttcatctattccttaggcactcatagttcacttagaataaaatatattactcatatgaattacgaactatgaatacgagagttgcactggtgctattactttcataccaactcaaccaatttatcttctttaattcaactacaaaaactggttcacaggaaaaactttattcttattatttgacagaacatattagtaatccgtcagggggtatatgaattatatgataaaataaaagcatgtaatattcgcagtagaagcatgtaatatgtgatttacttcaatctccttggaaatttggaattatttgatttacggcatttctggttaaatttgttttgtattataagtgcacctgcacaacttaaatgagaaatttgctgcactatatataatatgatgtttgaaggatggtgtatttaaagctagtcataaagcacatttgctggaggatttgctattaaaattagtgtaagggttcaccctttaaatgttgcttaaactaatagtaatacattatgaaatatgaatacaaaataaccattcccaatgttaatactttccaggttgtgaatgaacctacagatgctcactgtcctgttgtggagatgtctacacgttcaaaacttagttgcttgagttggaataaatatgctaagaatcaaatagctagtagtgattatgaaggaattgtgactgtttgggatgtaaccactcggaaggtaaatgttgaattcaaatggtcagtttgttcttgtatcagctctttgggtatattaattcattaatattgttttgaatgtcatgtgcttgcttaaattttctacagattatttactcctggctatcatttttcctttcgcagagtttaatggaatatgaagagcatgaaaagcgtgcatggagtgttgatttttcaggaacagatccctctatgcttgtatctggtagcgatgactgtaaggtactctgaaacatttatttggaagtttttctgccagtttccctaaaatgcttctttaatttctaatatttttgaaatgaaaatcatgcttaacatctgaattattatgtattagataaacttaaccttttgttgtataatcctattcatagttatagattttgccacctttggcattttggttagtaaaattcaaattttcttggcatggtatcttctgttgtatgattgaaagttattgatgtaaatgtaatgtctcttttctttgagcaggtcaaaatttggtgtacaaatcaggaagccagtgttctaaatatagacatgaaagcaaacatatgttgtgtcaaatataatcctggatctggcaattatattgcagtaagtacctttcattcagtcaaaacttagatttgatcctatccaggtattatcttgtatcgatcattcagcttagctgccaacttgtgacattgcttggcatttcgaagcaatatactttatatttaatttattataatatttcctcaggaaacagttcttttgtaatagtttgtgctgattgtacttaatagttaatatgaatggtgatattcacatgattgggtttcctgtctgcccatatattgtcttctgtaatatcgaccacccatcttccttatctgttttaatttttatatatctaatatgtacattctttgcatatttttgcaggttgggtcagcagaccatcacatccattattatgatttgagaaatattagccgtccagtccatgtttttagtgggcacaggaaggctgtttcatatgtgaaatttctgtctaattatgaacttgcttctgcatcaacagatagtacactgcgattatgggatgtgaaggaaaacttaccagtgagtaatatgaacaaaatgattgtttgctattgattgattcttatcacatttatccttcattttccatttaatttgtggacccatgttggcttttgttaatttaattataaccaataattttatactgaaaatctaaatattgacaattctctaatttctcatcgcaccaatattatgtttatttatggcatgtttgatgctcctgagtaccacttccttttgaattcaattaatttgcaaaacattcaaaatgcactacaaaattgattttgaagtgtgtaaagtggaccaaagctatccaaaacctttgtaaatatttaaatttgataatattttttgtactttctaaaataatatatatatatatatatatatggaatataaatataattttttctcattttcattctaatgtgtacaggttcgtactttcaaaggccatgcaaatgagaaaaactttgttggccttacagtaagcagtgaatacattgcgtgtggcagtgaaacaaatgaagtctttgtttaccacaaggtttgtggttttcaatgatgtgtcgttttcttgggcatttgccttttatggtactgaggattcaattgcccttttcaggaaatatcgagacctttgacttgccacagatttgggtcccctgatatggacgacgctgaagatgaggctggatcatacttcattagtgctgtatgctggaagagtgatcgccccactattctaactgcaaatagtcaaggcaccatcaaagtgctggtgcttgcagcttgaacactagaaaaaagaatagaatgtggaattggtattatcttttcccatgctattatgattgtatcatttattaattgtacatagtattcaggtgtatatggcaggctttagagatcttaatgaaatgttagttgagtgcttaaacctttatcaacaaaccaatttaagggactgaactataatttttgcccattgaagacctcaaatttattaaattttgaattaataaatgctcaggagacaataaaatatcaaatttggcatgtgataataataataagggtaaataattatttttgtctctgaatatgcaagagtgttggcaaattcatttctgaaagataaaaattcaaattttagtctccgaaattgaaaaaagtatgataaatttatttattaattaatttttatttattatcattaatgaaaaagtctacatggtacaaaggaatgaaaannnnnnnnnnnnnnnnnnnnnnnnnnnnnnnnnnnnnnnnnnnnnnnnnnnnnnnnnnnnnnnnnnnnnnnnnnnnnnnnnnnnnnnnnnnnnnnnnnnnnnnnnnnnnnnnnnnnnnnnnnnnnnnnnnnnnnnnnnnnnnnnnnnnnnnnnnnnnnnnnnnnnnnnnnnnnnnnnnnnnnnnnnnnnnnnnnnnnnnnnnnnnnnnnnnnnnnnnnnnnnnnnnnnnnnnnnnnnnnnnnnnnnnnnnnnnnnnnnnnnnnnnnnnnnnnnnnnnnnnnnnnnnnnnnnnnnnnnnnnnnnnnnnnnnnnnnnnnnnnnnnnnnnnnnnnnnnnnnnnnnnnnnnnnnnnnnnnnnnnnnnnnnnnnnnnnnnnnnnnnnnnnnnnnnnnnnnnnnnnnnnnnnnnnnnnnnnnnnnnnnnnnnnnnnnnnnnnnnnnnnnnnnnnnnnnnnnnnnnnnnnnnnnnnnnnnnnnnnnnnnnnnnnnnnnnnnnnnnnnnnnnnnnnnnnnnnnnnnnnnnnnnnnnnnnnnnnnnnnnnnnnnnnnnnnnnnnnnnnnnnnnnnnnnnnnnnnnnnnnnnnnnnnnnnnnnnnnnnnnnnnnnnnnnnnnnnnnnnnnnnnnnnnnnnnnnnnnnnnnnnnnnnnnnnnnnnnnnnnnnnnnnnnnnnnnnnnnnnnnnnnnnnnnnnnnnnnnnnnnnnnnnnnnnnnnnnnnnnnnnnnnnnnnnnnnnnnnnnnnnnnnnnnnnnnnnnnnnnnnnnnnnnnnnnnnnnnnnnnnnnnnnnnnnnnnnnnnnnnnnnnnnnnnnnnnnnnnnnnnnnnnnnnnnnnnnnnnnnnnnnnnnnnnnnnnnnnnnnnnnnnnnnnnnnnnnnnnnnnnnnnnnnnnnnnnnnnnnnnnnnnnnnnnnnnnnnnnnnnnnnnnnnnnnnnnnnnnnnnnnnnnnnnnnnnnnnnnnnnnnnnnnnnnnnnnnnnnnnnnnnnnnnnnnnnnnnnnnnnnnnnnnnnnnnnnnnnnnnnnnnnnnnnnnnnnnnnnnnnnnnnnnnnnnnnnnnnnnnnnnnnnnnnnnnnnnnnnnnnnnnnnnnnnnnnnnnnnnnnnnnnnnnnnnnnnnnnnnnnnnnnnnnnnnnnnnnnnnnnnnnnnnnnnnnnnnnnnnnnnnnnnnnnnnnnnnnnnnnnnnnnnnnnnnnnnnnnnnnnnnnnnnnnnnnnnnnnnnnnnnnnnnnnnnnnnnnnnnnnnnnnnnnnnnnnnnnnnnnnnnnnnnnnnnnnnnnnnnnnnnnnnnnnnnnnnnnnnnnnnnnnnnnnnnnnnnnnnnnnnnnnnnnnnnnnnnnnnnnnnnnnnnnnnnnnnnnnnnnnnnnnnnnnnnnnnnnnnnnnnnnnnnnnnnnnnnnnnnnnnnnnnnnnnnnnnnnnnnnnnnnnnnnnnnnnnnnnnnnnnnnnnnnnnnnnnnnnnnnnnnnnnnnnnnnnnnnnnnnnnnnnnnnnnnnnnnnnnnnnnnnnnnnnnnnnnnnnnnnnnnnnnnnnnnnnnnnnnnnnnnnnnnnnnnnnnnnnnnnnnnnnnnnnnnnnnnnnnnnnnnnnnnnnnnnnnnnnnnnnnnnnnnnnnnnnnnnnnnnnnnnnnnnnnnnnnnnnnnnnnnnnnnnnnnnnnnnnnnnnnnnnnnnnnnnnnnnnnnnnnnnnnnnnnnnnnnnnnnnnnnnnnnnnnnnnnnnnnnnnnnnnnnnnnnnnnnnnnnnnnnnnnnnnnnnnnnnnnnnnnnnnnnnnnnnnnnnnnnnnnnnnnnnnnnnnnnnnnnnnnnnnnnnnnnnnnnnnnnnnnnnnnnnnnnnnnnnnnnnnnnnnnnnnnnnnnnnnnnnnnnnnnnnnnnnnnnnnnnnnnnnnnnnnnnnnnnnnnnnnnnnnnnnnnnnnnnnnnnnnnnnnnnnnnnnnnnnnnnnnnnnnnnnnnnnnnnnnnnnnnnnnnnnnnnnnnnnnnnnnnnnnnnnnnnnnnnnnnnnnnnnnnnnnnnnnnnnnnnnnnnnnnnnnnnnnnnnnnnnnnnnnnnnnnnnnnnnnnnnnnnnnnnnnnnnaatattattttttcctctacatatttgtatcaaattgcttattttacatttctctctctttcttctttctatctctcacgattgtaattcttttttattattttactatataaatatgatttcttcccaaaaaaaatggtggagcatatagtcggaaaagttcaaacaagtttgatcactaattttgttacacagtgattacttgagcattttttgttagatacttgaacattagtttaacatatatttaaagttaataatcggtattattccaaaatcttaaaatttagctaatgctctttttactataagaaaaaaagctaatacttttaaaaatattcttgaccttttttctcgacacatttttatttatttctttttgcgctggaaagtggaaacacactttttccatttaatttcttttttcccctgaccttggtattaacaagaatcgtatttcttgaagttccaagatgaaggttggtaatccatcccttctaggttttagtgtacattacattccacatcagtgttggggaaaaactaacgggatctgtgtcaaagctactaaaagagacaaatatatgatgtcataagtcattccttatcttcactaactccatcttcaaaacgatgaatacattcattgtaaaaaaagcattacatatgcatagaagataaatgaactatgaagttttatagatgaggaataattttgaatatctaaatttttagaaactttaactactttattacatattatatttttataaataatttacaagaaatcttcacccaagtactaaatttttggacttgcaaggtcaagaaaacttgaacattattcataaaattaaaaaaaataaaacaaaaacataagaagaataagctcaggagagataccgccataacatctaccacactttcctttcattttgaattttgtggccttcaccttgaggggtcatgacaaagagcaccaaggtcatttcctgcaacaaacaggacatgatgaaaaccctaagaatggttgagatgagggagggtttcttcagattaaattcagctcagcttaaacagtggtatgagatgtgggagtgaggggaggtatatataatgaaaaactcaccagtgtcagcatggtccatataaattataataataaaaaatggggagggaaggaaaaaaaaaatcaaaatgcaataaaagacatgaaatacagaggcagtgaatataaatgatgattacctgcacgtaaaattagggttgatgtgtccctttctagcaagggtgagacaggaaggataatgagagtttgttttcttgggattcaaaaaatgaacccactattcctgcttgctcttaaatagtgatgtcaggttctgctgacattctcttgcattgctaccaaactgcaaaatatttttggtttcattttgaaccgtgaattgattctttgggtctttaattttgtactatcaggtccacttcgttgtaccatattccatttgcttcttagctagctacctacaacttaattttccatatttctatcttttttatcttcatgtatatatcctattcctactatgtatcatagggtttcaaaattatttatattgtataccaacatgcatgtttggttgcagtcgttagcaaactgcatgcactcggtttagttttgattaatgtagtaacttagttcattaccaagcaatttaagatttaaaattacaaaaacaatattttaattcttataattattaaatgttagttattttagtcatcatttttgttattttaggaataaagtgatcgttgttgaatattttcaaaattaaaatgatatttttagaattttaaaactaaattaatcggtttttctaattttatgtatggaccaattaatatatcattctcttagttttaggcttatggaaggcatactcatttattcatgaatcgtattgtttctaaattgcttcctaattgtggaaggtgtgagacggtaaattattaaatatgaagaagatatattaattaaatatataggttctagagacaaacgaatgaaggaaggaaatcggaattttaaatgatagagtaaattacatttttaaaagatgtttaaatagcatttcgtcctttccttttnnnnnnnnnnnnnnnnnnnnnnnnnnnnnnnnnnnnnnnnnnnnnnnnnnnnnnnnnnnnnnnnnnnnnnnnnnnnnnnnnnnnnnnnnnnnnnnnnnnnnnnnnnnnnnnnnnnnnnnnnnnnnnnnnnnnnnnnnnnnnnnnnnnnnnnnnnnnnnnnnnnnnnnnnnnnnnnnnnnnnnnnnnnnnnnnnnnnnnnnnnnnnnnnnnnnnnnnnnnnnnnnnnnnnnnnnnnnnnnnnnnnnnnnnnnnnnnnnnnnnnnnnnnnnnnnnnnnnnnnnnnnnnnnnnnnnnnnnnnnnnnnnnnnnnnnnnnnnnnnnnnnnnnnnnnnnnnnnnnnnnnnnnnnnnnnnnnnnnnnnnnnnnnnnnnnnnnnnnnnnnnnnnnnnnnnnnnnnnnnnnnnnnnnnnnnnnnnnnnnnnnnnnnnnnnnnnnnnnnnnnnnnnnnnnnnnnnnnnnnnnnnnnnnnnnnnnnnnnnnnnnnnnnnnnnnnnnnnnnnnnnnnnnnnnnnnnnnnnnnnnnnnnnnnnnnnnnnnnnnnnnnnnnnnnnnnnnnnnnnnnnnnnnnnnnnnnnnnnnnnnnnnnnnnnnnnnnnnnnnnnnnnnnnnnnnnnnnnnnnnnnnnnnnnnnnnnnnnnnnnnnnnnnnnnnnnnnnnnnnnnnnnnnnnnnnnnnnnnnnnnnnnnnnnnnnnnnnnnnnnnnnnnnnnnnnnnnnnnnnnnnnnnnnnnnnnnnnnnnnnnnnnnnnnnnnnnnnnnnnnnnnnnnnnnnnnnnnnnnnnnnnnnnnnnnnnnnnnnnnnnnnnnnnnnnnnnnnnnnnnnnnnnnnnnnnnnnnnnnnnnnnnnnnnnnnnnnnnnnnnnnnnnnnnnnnnnnnnnnnnnnnnnnnnnnnnnnnnnnnnnnnnnnnnnnnnnnnnnnnnnnnnnnnnnnnnnnnnnnnnnnnnnnnnnnnnnnnnnnnnnnnnnnnnnnnnnnnnnnnnnnnnnnnnnnnnnnnnnnnnnnnnnnnnnnnnnnnnnnnnnnnnnnnnnnnnnnnnnnnnnnnnnnnnnnnnnnnnnnnnnnnnnnnnnnnnnnnnnnnnnnnnnnnnnnnnnnnnnnnnnnnnnnnnnnnnnnnnnnnnnnnnnnnnnnnnnnnnnnnnnnnnnnnnnnnnnnnnnnnnnnnnnnnnnnnnnnnnnnnnnnnnnnnnnnnnnnnnnnnnnnnnnnnnnnnnnnnnnnnnnnnnnnnnnnnnnnnnnnnnnnnnnnnnnnnnnnnnnnnnnnnnnnnnnnnnnnnnnnnnnnnnnnnnnnnnnnnnnnnnnnnnnnnnnnnnnnnnnnnnnnnnnnnnnnnnnnnnnnnnnnnnnnnnnnnnnnnnnnnnnnnnnnnnnnnnnngagaaaaattatagatttaatcctttgttaacaaaaattaacaattaatatttggaaataactttttttaaatacccacatgccaaatgccagagataccgtacaataaatacgcgtatagagatatagtgaactgttattcacaagaacaaatagaatgtagtaaccactaatcttactacctcattctactgacattcttatactcatttatctctcaaatatatatatatannnnnnnnnnnnnnnnnnnnnnnnnnnnnnnnnnnnnnnnnnnnnnnnnnnnnnnnnnnnnnnnnnnnnnnnnnnnnnnnnnnnnnnnnnnnnnnnnnnnnnnnnnnnnnaaatttagagagaggggatgaatcaaatggtgtctcagtgtaagtcagataaagtcttcaaactcataatatttaaaaaaatacttaatttaatttgttcatctcaagaaaacgagtgagaacttgaccacacaacctatcatctaaacatttttgtcgtttttttttagtatacaatgatagcattaacaatctaacataagttttcatgcatttacttatccctaccattaagtcaactctaatgattctatcgtctcaattttgtcaataattaatttctatcaaaaaatataattgattatctttagatggatttattccctcaacaaattaaggtccaaaattagtccaactgagccaaatctgttaatatttaaatcaactcgaagctcgacatgaacttttttttagttcaaactcgattcggttcaagtttgcgaataactcggttaaactcatttgctcgaattacatgaatcaaaagtaaaaaaaatttaaatcttatatatttcaaaagtttaattaattagtagattttagataaaatgattgtttaatttaaaaaaaataaattgtatatatatatatatagtcgtttcataaaacaactcaaatttaacttatttatttaaccaattgattattaaattgagttttaaattatttttgaactacttcagttcatttttaccactactttcaagcatgttttttctacttacactcaaacctgatatattgtgaagaataacaagtttttaagatattaattaagaaattaataaatacaaattcttatataatatgaatatgaataacttaacagtcaatataatatgcttctaaattaaaaattaatattcaatcaacaccagtgaataactgttagctgacagaagagaccataattattgaagttattgaaacatgagacatttggatgatattcttgacttttactcctcttgaaggtttttagccattccttattcgtcaaacatctgcatatcaatccaagaaacattcacttttatgggatgttctaccatgctgattttttacctgctgggagatcacaagcttttatttccgtccattaggtttttagtcattccttagtctttctttttattttcggcataagaactgagcttttttaattgaagaaacaaattctaggaccttctatcctgtggataatatagaatcaactcaatcaagactcacttatttcatgtttattaggggagcactaatttacatgactcacaaattcataaagagaaacgtgacaattttttttacgtgcagttaaaaataaatatattacagtattattttttctttcttttttacggtagcgttcacttattcttttttctttttagacaaaatatttatatattatttatttattattactaatagnnnnnnnnnnnnnnnnnnnnnnnnnnnnnnnnnnnnnnnnnnnnnnnnnnnnnnnnnnnnnnnnnnnnnnnnnnnnnnnnnnnnnnnnnnnnnnnnnnnnnnnnnnnnnnnnnnnnnnnnnnnnnnnnnnnnnnnnnnnnnnnnnnnnnnnnnnnnnnnnnnnnnnnnnnnnnnnnnnnnnnnnnnnnnnnnnnnnnnnnnnnnnnnnnnnnnnnnnnnnnnnnnnnnnnnnnnnnnnnnnnnnnnnnnnnnnnnnnnnnnnnnnnnnnnnnnnnnnnnnnnnnnnnnnnnnnnnnnnnnnnnnnnnnnnnnnnnnnnnnnnnnnnnnnnnnnnnnnnnnnnnnnnnnnnnnnnnnnnnnnnnnnnnnnnnnnnnnnnnnnnnnnnnnnnnnnnnnnnnnnnnnnnnnnnnnnnnnnnnnnnnnnnnnnnnnnnnnnnnnnnnnnnnnnnnnnnnnnnnnnnnnnnnnnnnnnnnnnnnnnnnnnnnnnnnnnnnnnnnnnnnnnnnnnnnnnnnnnnnnnnnnnnnnnnnnnnnnnnnnnnnnnnnnnnnnnnnnnnnnnnnnnnnnnnnnnnttttttacaaaataattaacaggattttttttttataaaaaaaaggatcaacgtaaataccaaattttattataaatacataaataggtgatcaatatttataatcttaaaaaatcatttaatttatctaatgatatcaatgatttatatttctattcccacgtagtcaaggaccacctatgtcttctaattcaatgaattagagattaatcttctggttgttgttggatcaagaaaattttaaacactatgagatttgaaaatgagttttcctgtcaaataaattgttcctcttatgtgaacacaataagtccttataccattacgctaatcatatgagttactaatgatcgatatttgtaacgttttggtaaattattattataattaccattttggatatcttacatgaaatttgaatgatatatatttattcatttaaataaattcgatagatgaaatatcaaatacaataattttaaaattatataaaattttgaatacttatctacttactacaaaattttgtttcccaagaaattggtagttacaatagtttcaaaataaatcatatattttaaactaagattttaatcagtttttatatactttttatcagtgacgttaactaagattattagttatataaaattaaaatcatttaaaattaagatgacaaaaacattgaaattggatggggccacatgcatttgatgttcaatgccatcaagtggctatgtaattgggcattgctgcaaatgaaaagattggcacatacatagcagattgcagcagcactggagaatgcataacttgttgggtttttggttccctaccattctgattgacagagaaagaacataaacaaaaccctatgaacttagctacaaagggatcttccccaccagtcctactttactgaatgttgcttttgtccctatgcctgcaacttccaaattcacataaaagcaaaccccaaagccctaattctcacgtcttatgtaataactctacattgcagtctcataattgacccctgcactgcagtgtaaggtcaatctcagatggggtttctcattaaatgccccccttcacattgtaactaataaagtgctcacatttctgaacacaactaacaacaaagacatgaccaaaatggaactaaatgcaagtcatggtaaaagcaagttaaaacttttaactggccaagtgatatattttatgtacattattattatacatatattttttttataaaaaagaaaaacgtaaacaagtactattattaatttataaactatatattgtaattggttatgttatttgaatgaataataaaagcagtgtattgtgttgttggtgcttggggaccagcaaaatgtttaccatggctgtagtactgagacactgaccaattttggatttctggagtggtgtctgaaacattgtggggtattttaattcccaaactgagtgctctaactgaccaccttttactgcctgattccacaacctcgtgaagtcatcatgaaattttaacgccttgctaggtcaaccctgaattagttttccgtatcaacctactcattctgttaaatattcaatgacctatttccctccactgagctgtttaattagatcaacttctttttgaataaatttaatctgacgtttttgcaaaagaataatgcatgttccgtcgatagcatctttagaaaaagaaatatatagaagacagaaatacattttcttttataatatagaagagagaaatactgtcataggtgatacagtatactatctattggcacgagagaaattaaaatactattagagagaaatgagaggtgttaaaaccattggaatgtccatttatcattgttgtttgctaaacaacttcagtccagacataagattgattttttttttccaaattattttggaacgtaatactctcaaaagatgaatgaatcgagttatttttcaactcaccattctcaaaaaggagttgaacgaattttgatgaaaattaatctaattaatattttgccattcctgaaaaggatttctttcacacactgctaaggatgattgtgacagattgtgtgtttctcaaagataatacaataatgtacaagaaaattaattaagaatgatacatattaagattaaaaagaaaacaattaattagctgaactataagacgtaaatgtacatggagaatattcttggtgtagttgtagaaaaggggtgtcaattaagattataagagctggaagctgatgtgcaggatacaagagtaaaaaggggggaaaagccatttggtacataatatccaaagcttggtctttcaagtgaatgaatgttatttttttttttgtgtgaaggaatgtgtatgcggaactaccttgtattcaatgtattgtattaacttaataaaaaaatgtattgtatcataaagtggctttgcaaatatatatatatatatgtgtgtgtgtgtgtgttgtgtgtgtgtgtgttttgaacttgaaatggtgttttttcacgacctttgcgaacatagcacacagctaattaggatgggtgcagatcctcatgctcatgcataagctattgtgattagatacttttcggtgattaaatgacttagtcaaatgtgttgggtaacacagatcctcaaatcaaatgcagaagtcgaatgaaaaggaagaaaacaagagagaacacaatcaatctatttaacgtgagaaaacctttctcaatgtgagaaaaaaaaaactcacgggaccttgtccagaatcaaaattcactataacaataatcggttacaatgaatcaaaacacaccaaggtggtggtacactcaacctctccaacaatggtgatcactcaaacgctcacagtgtttcactctaagctctcaaatatgcaggcacggaggcttgctcaaatgtgctctcaagaatgtcacttgaggctctcaaatattctctgacgactgtctacgtctgagtctctcaattctgagtctacctttcttcacccttaactaatgtatttaaaggagtgaattaggtttagtattttagaacccttaatgggcctaggtcaatattgaaggagtaaaggcccaatccaacaattctcccctacaacttcaatgcgtcaaaatcaaaaccaggagctcggtatcttcaatcaaacagcccggcatcttccatgcgctggcttcttcaaacttgacgggttcacaacccggcatttgtgttgcctttagcaacaacaacctggcaatgtcattgcgatgggctcaacaacccggcaccttcacaacaatcttcaaatttccttgctggtaccggcttggtcatcatgtcaaaccaattcaggtcgatgtgcactttgccaagtgcgagttgtctagcctccaccacatcctggatccagtgatacgtcacatcaatatgcttggtacgggagtgatagatcgagttcttcgcaagattttatagtgttaggtaagattaaagatctttaaagattttttaagatctttttaattattttgtttagtggtatattttattttgagatcttaaaaaaaagaatttttttttgaatattgtgcagatcttaagagttattctacaataactcattctccacattcttcatattaaaaatttgttcatttcctttattagaatatgtaatcaaaaccagatattgaacttaagatctttactaagatgttcaacagttaactaactcattgtgtgtttgagtagaagattataaatttatgtttcagacaaatatacgtttgcagaaatatcattatttttatttttatttttaataatagtgtccaacatatttacaacttatattaaaacacatacttaattggttattgttgggccctctccgtgcaggcagtgacggatctaggaccttggattagtgaggacaatttattttaaaaataaaaattgataattatcattataatattgattagttggattcaaacacgaagataagagttacaaaatataaagttttaagataaatatttacattttattaaaataagagggtgtatttacttactcttacatgtgaacgggtaaagaggttcaaatacataaaattatggggttcaaaatataaaattatggggtataaaataatatttttttgcattttattaaaataagatggtgtatttatttactcttacatgtgaaatggtaaggaggttcaaatacataaaattagaggatgcaaaatataaaattatgggatataaaatataatattttaggataaatattagtgattttattaaaatggtgaccctggattgcatatagatccgcgtgcaggcttgctggaagtgagttcaacgtaccaatgaacctgccaaagatgcctatccaccccatgaggccatgatgctgaaaggattaatctcttcaaagaaaaataacggttgaaaaaaggcaagtctcctcacatgcatggaacgttggcatcgaattagtaaagagaaatacaatatttttatattattttctttatgtataaccaatagaaataggaagaggagaaaaggatgtgataaaataaaatgatatgatcgaaacatataaagatttttttaaaaaaatgttctaaaatgtcatgtacatatatagatactaggcaaatggttgatatatatacccaatttttaagacgttggaggtggacaaattaaagatacggaataaaataaataaaagagaaggaaaagacttattgaataaatatctagtttggtttttgaaaatgtagggttggtagtgccaagtgtgtctgaatgttgctatattctaaaatactctctcaaagtttagaacgctaatccatttagtctctccatcacccattaacactcatctaagcatccatgtaaccaattacctttattaattaagggcgataattcaatccatttatctatcattcatccacaagttaatccactcaatccatctattacaaacaaacaaagttaaatgaattgggattaatcaaagcttccgatgagaatatttgatatcaatatcatagttaaaaaaaattaaatgaattggatataatccatcaatttattttatgaatgattaataatacatccattattttttaacatccaacgaattctccaaataaatacttaattccctccatttttctgattagaaatccacattgaactatatatcatatcttgatccagccgatttgaagactaacttgaaggttcgtgagaagcctgtgaagactccaaatattattcttataattgatagctttttgcgaaaaaaaattactctgacaattatttgggagactatacttgtcaactttttggtagcacatgttgtacgaagaataagaatatgaaaatggtatgaaaggaacttggacccaatgaaatgaacacatacattgaggctccatgagcgtgagattctcgaaacgaaacggaagtcctaaaatcactgttacctacaaggatacgttatcttcggagaaaaaaacaatgcatgtgagtctcttctcattgaattaagtcaaagtatacggcgttttataccatatataactgcgtccatttttttttttatcatattgaaaaagataatgttaagaaatttataataattgcgtccatttctctttaaaaaaaataataaatacgttcatttgttcttacagtcaaaagcttataagaatagtgaagctgtgatgaaggcacccgttttcaggtttctcatttattgagacgtttggataagctaactaggcaatgcaaaatgcttcttcatagtattaattattcttgttattattattattattcctttgtgtgcattttacgtggtcaaattcatcgttgcatttttacacgcaaactaacccttggttccgtaattgatgcagctcataacatcaactgagaatctttttattttttaaactggtcgttagcaaaatgataaaccttttcatgcataaataatcaatatactttgattagcttcgaattaattaattttctcttcaactaatcctttattttagtatattgtttggcattaaacataaaaaaaaagtatattgtttgacatagtttagtacggatgtgcaagcttgggatgaggggaaacgtaaacaaaacaaacgtacatgaacattaatctttgctatctttagtgagcatccacaagttttttttaacatttttattttaaaaaatataatttaaattaaaatatatttaaaatgaagtaatttatatttagacgctttatataaaaacaaacgttactataataataataataataataataataataataataataataataataataataataataataagacactagcagtataaaagtgtttgttattgttattcaattataaattattatatatataataaaattattaatttttataataattattttaaaatcatttttaagatagatcattgtatttgtttaattagcaacgtaaaaaattcacactaacaaagaaaattaaattctaataaaaaacactaaagtgaatttggatggtccttgacatgttatagcttataagtcgtctaccatgtatgggccttgcccatgcacatcttgtatgggccggcagccaaactaatattttaaaacctgtccacttaatttacctttttttttataacaaagtttgttaaaactaataacaatttatttattttttagaagaaagactatacactgattgtgttaaataattttatactattattcaatcacaaattaaaatatatgataaattttttaacttttatgataatcattttaaatgtcatattaacaataatttatgattatatggtaatgtaaaattattttacattataatgcataatcattaaactttttatttattcataaatatttttggaaacttaaaacattagtaacaaaatattatgtcatcgaaaaaataataaatttcaactattaagaatagttaagaaaagttacgtcaactaaaatttgtaagaacaaacttcagtgtaatttaatattgaaaaatgagtcccgtgaaaaaatttaatagtactcgtgcagtttcaattttaaatatatatatatataatatatagcaattaaaagtgatgtatcttaattaataaatattgttttccaacttcctccaccgagaccaagagctataaaattggtgaaagatttttctttaaaacatttatttcaacttgatatttttcacttctaataccaaacaggcacgacttttgcctgggatgggaagatggaacgtgcagtgttgaatgacttaacaactctacgttattgtaagtcgtaaacccttaaaaatttaattaaccactgtatttgtgacttggggctttgacatggaagacattccaacccataaaagagcatatattattcaagaaaacctatccaatatctcaaaacacaaataattttcgatgccttgggtgatacgttaaatgtcgaagaaatcaaaggcatactcttctgtattgacgtcaaactagctggcctgcctctgataattttgcaaagcattactcacattaatttgagagaattaagaaaaaataagtttgcatctctcgttctgaatttctcataacatgcagcacacgtaacaataattgaatagtgcaacctttttctctattattgagccatttggataaggagaagcacttttgcgctttactcggcccatcgacaatttctagcatgttcacacttcatagtacccttggtttccacacatgatgcaactcataatttcaacaaaaatttgtttcattcactttgtactctatgatttaatattggaaagtactataaagaaatcaataatgcgacatttaataattaagaatacgtttttatcatgatttatcaaaaagaaaaaaaaattatatgtattaattccatgtctataattgttacacatatatttcctctcatctcaaatatattaaaaaatcttttttnnnnnnnnnnnnnnnnnnnnnnnnnnnnnnnnnnnnnnnnnnnnnnnnnnnnnnnnnnnnnnnnnnnnnnnnnnnnnnnnnnnnnnnnnnnnnnnnnnnnnnnnnnnnnnnnnnnnnnnnnnnnnnnnnnnnnnnnnnnnnnnnnnnnnnnnnnnnnnnnnnnnnnnnnnnnnnnnnnnnnnnnnnnnnnnnnnnnnnnnnnnnnnnnnnnnnnnnnnnnnnnnnnnnnnnnnnnnnnnnnnnnnnnnnnnnnnnnnnnnnnnnnnnnnnnnnnnnnnnnnnnnnnnnnnnnnnnnnnnnnnnnnnnnnnnnnnnnnnnnnnnnnnnnnnnnnnnnnnnnnnnnnnnnnnnnnnnnnnnnnnnnnnnnnnnnnnnnnnnnnnnnnnnnnnnnnnnnnnnnnnnnnnnnnnnnnnnnnnnnnnnnnnnnnnnnnnnnnnnnnnnnnnnnnnnnnnnnnnnnnnnnnnnnnnnnnnnnnnnnnnnnnnnnnnnnnnnnnnnnnnnnnnnnnnnnnnnnnnnnnnnnnnnnnnnnnnnnnnnnnnnnnnnnnnnnnnnnnnnnnnnnnnnnnnnnnnnnnnnnnnnnnnnnnnnnnnnnnnnnnnnnnnnnnnnnnnnnnnnnnnnnnnnnnnnnnnnnnnnnnnnnnnnnnnnnnnnnnnnnnnnnnnnnnnnnnnnnnnnnnnnnnnnnnnnnnnaatatcggataatgtcatggttaagcatgcttgagattaattaatgtgatttaaaattttaaaaaggcagacattttttttgtgtcacttccttttctcctctttgaagaactcaaacaaatattaatttgttgggccaatcttctgtagtacgcgtagtctacttttaacaagatagcgactgatcaatttaagaaaatagtatagttgcctcatgttttgaagcaaaatattatccacaaaacactagctagataatttcattgtttggtagcaaatgtcatggtttttgagtgttaggtctgctagcttgtgtttgcaatgaacattgctgtctagcgtttaccacgtgtacaagtgattaattatacaagttttacactaataatgtatgacacgattagttaatagtattgtagtttgttctcttgggatactgacaagagatttatttcctagctgctttatgtatggaaaactttgttggaagaaataatattcatttcatgattttacgtccgcaagaaattgatcttcgactgtggttatgcaatttctttagtgaaaaaaaatacacaacttttacagttgaattcaaatcgcaaaagtattattagactattaacactaatttttcctctgtagtttgtttacatatacaggtgcacaaatgagagtatagcaattggatgcaacaagtatcataaattgctaaaaatgcttttaaagtcaaaatcattttattaaaaaagcataaataacctacttcaaataattgttattttttttatataattgtccattttaagaagaataaaaaaaaagtgttaaaatacaatattatcaaaggcccctgaattcactgattatcaaatgggaagtatggaaccttatcctttttgttaccctagtcgttctgacatcaacaatgcctattatagagggtgttagtataatttgagccaaataacagcagcttactttgaatgtgcatattattaatttatttggataatacttgaaaatagccatcaagagtttaaagtaatgtcctcctaattaataagcaatgattatgactttcacgttgacataagccgttggaggggaccatattatatctacaagtcatattccataaagttcattctaaaccgttgcttgagctaattggtttatagcttgataataatatatatgcaataggattccctacaaaatttaatttattgtataatagctccagatactgaatgagatggaaaccgtccttcgtttatgagccaggcattttgcgcaccataataggtgggaccaacataacccaacaattcaaatcacattaaaccaaaagaaaataacttatcaaacatgaaaaacaaaaccatgcagatcttacaacccttaggaacaaaggcataaaattagaccagttaattttattttgttggcaacaaattattttttttctttccttctcctactttcccagacaagagatacaaaaaaaaaagttgaaactcagtcgcaaatattattctttcatggtcatcgaaaagttagacctgattatatatattactatatacgtaatcctgtnnnnnnnnnnnnnnnnnnnnnnnnnnnnnnnnnnnnnnnnnnnnnnnnnnnnnnnnnnnnnnnnnnnnnnnnnnnnnnnnnnnnnnnnnnnnnnnnnnnnnnnnnnnnnnnnnnnnnnnnnnnnnnnnnnnnnnnnnnnnnnnnnnnnnnnnnnnnnnnnnnnnnnnnnnnnnnnnnnnnnnnnnnnnnnnnnnnnnnnnnnnnnnnnnnnnnnnnnnnnnnnnnnnnnnnnnnnnnnnnnnnnnnnnnnnnnnnnnnnnnnnnnnnnnnnnnnnnnnnnnnnnnnnnnnnnnnnnnnnnnnnnnnnnnnnnnnnnnnnnnnnnnnnnnnnnnnnnnnnnnnnnnnnnnnnnnnnnnnnnnnnnnnnnnnnnnnnnnnnnnnnnnnnnnnnnnnnnnnnnnnnnnnnnnnnnnnnnnnnnnnnnnnnnnnnnnnnnnnnnnnnnnnnnnnnnnnnnnnnnnnnnnnnnnnnnnnnnnnnnnnnnnnnnnnnnnnnnnnnnnnnnnnnnnnnnnnnnnnnnnnnnnnnnnnnnnnnnnnnnnnnnnnnnnnnnnnnnncgtttgaaatttatttaaaagtatattggtacgtaaaggtcatgtgttaaattatgactaactaaattcattaaatactctcctagtattctttttatcatttattataaaattcgaaaacaacatcttactttgaaaaaacaaaactccgcttgataaacaattggttggatttacacttttaagattttatagacaagcatgaatacttgtataattttacgaaaattgacccatcatcgatttgatcaaaacagtaaattaatagttaaatgggtgtgtcactaattagtccaatttaattttgtatatattaaaaaaatatatatatacaggtatagttaatataatttgaatgaaaattttataatccaaatttaaaacattagaaaaataacagttgaatcatccaaaaataacattatactatagaaattatttttctcttttatatgttgactatccaaaataataatatactatgaaaaaaaattctttgtgttgtatcattgtttgctagtcttaagaaaaaaaaatcccggatgtattaaacttgttagtaattatgagcagagcagatggatgagcttgacttagtggtaacactagcttggttttgtgtgtttgaatctgttgataacattttgtaattttataagatttgcttctagatgttgtttgcacgcatagaaaatcattctcaagattcaatatctgcatataatatttggacacgtcaaaacaatctttatccctttgtaaatactgactgtacgtaggtggagtagtggtacggggttgaaaattgtcacacgggttcttttcacttaacttccaaataggttaaggttgctccattggaagacttactatccatcaatttaatgttcaatgttgcacgattgaccaaattcaaaatacttcattttcacctttaagtatatgcttttctaataaaatcttgagtcattttaccaatcaatttacaatttttttttctctggagttacaattatgttatatagagtaggaccactgtaataacactattttaagtgagaatataagaaaaattaataataataattatatcaaaattaaaatatttaaaatttaaaattaaaatataatatattattaaatttttaaattattaataaaataaaatctataaaaatttcaattatcacttctaagtattaacatatatcaaataactcatcatcaccatcaagattgtcgattctatcactacaatcgtcatcgctaacaccatcattgtcgatgctatcatcacaatgatgatggtgatgttgatgaataaacgataattgagatattttaatatgatttgtttagtgaatcttttaaagatttaatagttatattagattttaattttaatttttaaatattttcatctcaatcgtctattatttttaatcattatctaatggttgttattagttgttctcatgttctcacataaggaagtatttttacaagagttgtattcatgttatatatatatatatatatatatatatatatatatattcaaccgttagattaaaatgaatatttcaaattaaaatattttaattcaaatttcttataaaaaattaatggttaaattaatttatgacgtcttaaaatatctcaaatctatcatcaccatgaccactattactttcatgactattttcgccataattgtcatggtcgtcaccacaaccaccaacatgattatttttgtcgttactatcgttaccaacatcacgatcgcctccatgactactgtcatcgataccaacatgatagtcgttgttgtcgtcaccactttagtggcaaagataacaacaatcatgttggtggcgatgattgtggttatgagaacaatcttgatataaattaaatttttaacatatttgataattttatttgataaatcttatagagattttgtgattaaatgagtttttaatttgaatttaaaatattttaatctcaaccttttattttaatctaatggttgagataaattattcacattctcacataagattgtcattctcatatgatacattatctatatatattataaatttaaaaagtaaataaatcaaatataagtattagtaacaattaataataataataaataaatatgttcatgtaactagatcgtaactagagtttaacatacctaaccagaagcatttaagtgagacaaatgtaatcatcctctcaggtctgtcactgggattcttattcacgttgcccccatccttgagtagtaatggtaaatcacgctttagttctcccttaattgctatgattggcatatgtaactttcgggcgactcagggtcatgtttgctgtaaggcaatttaggcaagtacattagactcccgtagaaattaaatgcttattacttaatcacaaggtccctttttttttttttaagtaccttaggtccatcaatgtcattggcttaactttttaagttgctagtataataccattttaaaatctcaatgatacatatatacgttaggcgtttaagagattataaaaatgtgtagctgcaactagtaagtaaaatgtgcaattaagaaaagaagataaataatcaaattctgtctgattttgaagatatcaatttgtttaaattttatctgagataaacaatattataagatagattaaatggactaatcatcgtgtttattaagaatgaaatattagaattataattaattatataaaatattaataaatgattttgtaatcgaaaatattagatgacgtatctataaaagttttgtttaaggccctaaaatttctaaacacggccttggggtgactgttagggttcttgagattgcagctagaagccaatatttggggactgagtcggtcaacatacgaccggagatatacaaaatcttagaactattaaattacaaaaaatgatgtaacttgatccctctttgctctctctctcacaaacattttttatttgagtaaaaagaaattcacaattgttaatttattagaagtcttaaaatgaaaaaaattatttataaaagaatcatctcttcaaaaataaacttttcaattcttaaagtgaatttccaccattaacattaccttgttattctgaagaagaaaaaagaagtaaaggcaattaacagtcaaaatacttttacatgtgattatcaggtagaaaaagacttttgagataaaagtacatctgtaaaaagatcagaacgaaatttcactttttattcgtctgcaatggaaaatgtatcacaataatttttattgcaaactaaacatgtacgtaattatcacaccactgcatcctcccactaaaacgatttccacactcaccagccgagggtcaatactcaatcggcttcgtacgcaagggcatctccatctcactccattaaactgaacaagaaataaataaagtttgtaaaactaagcacaattaattaaaaattgaaaagacccgacttgttaaagccaaattaatattcttcaattaatgggttcctttccctctatgtttgttggtgacttattcattcttcccgtgtggttcttactgtgtaaatcgaatcaacatagccgaaatgtgacaaaagatatcaaggacaaaagaatatgaccagttactgtgtcagctggatgaaaaaaaaaaaaaaaaaacaagatagaaactttatactacttttcttcttttttaagcaattttggaaaagacaaaaggaaaagaaaacaataattattcgtcaaacactcaaacctgcaattctttcttattattttaaggggggaaactttatttatcgtttttgtgaacattccatgtgtttaaagagccgggtaagcagtgatgcaccatgttagtgatattggtcttaacaaaaggcctaaaaaaaacaaataaagcctatcatgtatgtactaatagaatgatttcttttaaataaaaaaataaaaaaagggaccgataatagattgaattgatatcttctatttagaccattgctaatagtgccgtctttctataggttttaacttttttttaggttatattatgttacattaaatttaagaattttaccaatatttttcctctaataataaaattatttaagaaattaaaattagtttcacatcaataagagaacatgtgtgaaaagaatgtgttataatgtgttcttagcatttctttattaccccacatccatatactttgtatattttttttataaaaaaagttaatattaagaataagttcttacaaaagaactattcttacacaatgacttctaacacaattttctttaatcatgaacttttataagaatctattttatcattaaaannnnnnnnnnnnnnnnnnnnnnnnnnnnnnnnnnnnnnnnnnnnnnnnnnnnnnnnnnnnnnnnnnnnnnnnnnnnnnnnnnnnnnnnnnnnnnnnnnnnnnnnnnnnnnnnnnnnnnnnnnnnnnnnnnnnnnnnnnnnnnnnnnnnnnnnnnnnnnnnnnnnnnnnnnnnnnnnnnnnnnnnnnnnnnnnnnnnnnnnnnnnnnnnnnnnnnnnnnnnnnnnnnnnnnnnnnnnnnnnnnnnnnnnnnnnnnnnnnnnnnnnnnnnnnnnnnnnnnnnnnnnnnnnnnnnnnnnnnnnnnnnnnnnnnnnnnnnnnnnnnnnnnnnnnnnnnnnnnnnnnnnnnnnnnnnnnnnnnnnnntaagtatagaagatcatttataaaagtaatttatgatatattcataaattattttcaacttattttaataaaattttaattaagttatttacccatacaaatccttaattaattagttgattactctacatataatttatatgtaagaacaataatatttattattttcatttgcctaaattatattttacaacacttaccttgtaattttgacttgaatcaagttaataagtgaatttgagttgaaatgagttcaagttgaaaataatgtaaatctttttacaaacttacataagttatttaaagttttaaacaataaattgaatttttatatgattgattgttagaagaagaagaaaaacgcaaaattcgagtctaggctaaggaaagaagagaatatttttggtacactttttgttgcactttctggcgtgagatggggaaatcagaaagaaaacaaataaaatataaaacaaaacaaataaagtaaaactagcaaagcaggttggtatgtggcgcagagccctcgctcgtactactgagtaatgaccatcattattattattgttattcaatttatttatttccttttccaatggccaaagtacaaaagggattctcagtaccagcatattccttcgaatgttctattttcctctttaatctttccagaacaatagaacattaatcattaacctttttttaaacacattaatcattaacctattcaaaagtattaaaaaatggtatatctatagtattttagtattgttaaaaacaatatttttaccaataaattattagtctaaataatattaaactcaattttcttaaaatttcaaatatgagttttatannnnnnnnnnnnnnnnnnnnnnnnnnnnnnnnnnnnnnnnnnnnnnnnnnnnnnnnnnnnnnnnnnnnnnnnnnnnnnnnnnnnnnnnnnnnnnnnnnnnnnnnnnnnnnnnnnnnnnnnnnnnnnnnnnnnnnnnnnnnnnnnnnnnnnnnnnnnnnnnnnnnnnnnnnnnnnnnnnnnnnnnnnnnnnnnnnnnnnnnnnnnnnnnnnnnnnnnnnnnnnnnnnnnnnnnnnnnnnnnnnnnnnnnnnnnnnnnnnnnnnnnnnnnnnnnnnnnnnnnnnnnnnnnnnnnnnnnnnnnnnnnnnnnnnnnnnnnnnnnnnnnnnnnnnnnnnnnnnnnnnnnnnnnnnnnnnnnnnnnnnnnnnnnnnnnnnnnnnnnnnnnnnnnnnnnnnnnnnnnnnnnnnnnnnnnnnnnnnnnnnnnnnnnnnnnnnnnnnnnnnnnnnnnnnnnnnnnnnnnnnnnnnnnnnnnnnnnnnnnnnnnnnnnnnnnnnnnnnnnnnnnnnnnnnnnnnnnnnnnnnnnnnnnnnnnnnnnnnnnnnnnnnnnnnnnnnnnnnnnnnnnnnnnnnnnnnnnnnnnnnnnnnnnnnnnnnnnnnnnnnnnnnnnnnnnnnnnnnnnnnnnnnnnnnnnnnnnnnnnnnnnnnnnnnnnnnnnnnnnnnnnnnnnnnnnnnnnnnnnnnnnnnnnnnnnnnnnnnnnnnnnnnnnnnnnnnnnnnnnnnnnnnnnnnnnnnnnnnnnnnnnnnnnnnnnnnnnnnnnnnnnnnnnnnnnnnnnnnnnnnnnnnnnnnnnnnnnnnnnnnnnnnnnnnnnnnnnnnnnnnnnnnnnnnnnnnnnnnnnnnnnnnnnnnnnnnnnnnnnnnnnnnnnnnnnnnnnnnnnnnnnnnnnnnnnnnnnnnnnnnnnnnnnnnnnnnnnnnnnnnnnnnnnnnnnnnnnnnnnnnnnnnnnnnnnnnnnnnnnnnnnnnnnnnnnnnnnnnnnnnnnnnnnnnnnnnnnnnnnnnnnnnnnnnnnnnnnnnnnnnnnnnnnnnnnnnnnnnnnnnnnnnnnnnnnnnnnnnnnnnnnnnnnnnnnnnnnnnnnnnnnnnnnnnnnnnnnnnnnnnnnnnnnnnnnnnnnnnnnnnnnnnnnnnnnnnnnnnnnnnnnnnnnnnnnnnnnnnnnnnnnnnnnnnnnnnnnnnnnnnnnnnnnnnnnnnnnnnnnnnnnnnnnnnnnnnnnnnnnnnnnnnnnnnnnnnnnnnnnnnnnnnnnnnnnnnnnnnnnnnnnnnnnnnnnnnnnnnnnnnnnnnnnnnnnnnnnnnnnnnnnnnnnnnnnnnnnnnnnnnnnnnnnnnnnnnnnnnnnnnnnnnnnnnnnnnnnnnnnnnnnnnnnnnnnnnnnnnnnnnnnnnnnnnnnnnnnnnnnnnnnnnnnnnnnnnnnnnnnnnnnnnnnnnnnnnnnnnnnnnnnnnnnnnnnnnnnnnnnnnnnnnnnnnnnnnnnnnnnnnnnnnnnnnnnnnnnnnnnnnnnnnnnnnnnnnnnnnnnnnnnnnnnnnnnnnnnnnnnnnnnnnnnnnnnnnnnnnnnnnnnnnnnnnnnnnnnnnnnnnnnnnnnnnnnnnnnnnnnnnnnnnnnnnnnnnnnnnnnnnnnnnnnnnnnnnnnnnnnnnnnnnnnnnnnnnnnnnnnnnnnnnnnnnnnnnnnnnnnnnnnnnnnnnnnnnnnnnnnnnnnnnnnnnnnnnnnnnnnnnnnnnnnnnnnnnnnnnnnnnnnnnnnnnnnnnnnnnnnnnnnnnnnnnnnnnnnnnnnnnnnnnnnnnnnnnnnnnnnnnnnnnnnnnnnnnnnnnnnnnnnnnnnnnnnnnnnnnnnnnnnnnnnnnnnnnnnnnnnnnnnnnnnnnnnnnnnnnnnnnnnnnnnnnnnnnnnnnnnnnnnnnnnnnnnnnnnnnnnnnnnnnnnnnnnnnnnnnnnnnnnnnnnnnnnnnnnnnnnnnnnnnnnnnnnnnnnnnnnnnnnnnnnnnnnnnnnnnnnnnnnnnnnnnnnnnnnnnnnnnnnnnnnnnnnnnnnnnnnnnnnnnnnnnnnnnnnnnnnnnnnnnnnnnnnnnnnnnnnnnnnnnnnnnnnnnnnnnnnnnnnnnnnnnnnnnnnnnnnnnnnnnnnnnnnnnnnnnnnnnnnnnnnnnnnnnnnnnnnnnnnnnnnnnnnnnnnnnnnnnnnnnnnnnnnnnnnnnnnnnnnnnnnnnnnnnnnnnnnnnnnnnnnnnnnaatttaataacatttaaaattttgattcccaaaaatcttatatagatatttccaacaacatttatgaaaaatcaaacaaattttaatcatttataggaatcataattcttaggctaaataaaaataaataaatccttgtaccaaacgtcttattcatagagtattcccaaccatgttgcttgctgtatttcaaatccaatttctattccaatttatcaattgccatcataaatctgaggtcagttataaatgaccaatttatagaggcattaaaaatagaggcaacaatctatttgaaagagatgaactagaattagatataatagtttagatcacatgaagttaggaatgggattcgtgatccctatatacaaaaaattaggtatatgtaatgaaaaagggaaacatgacaaagagaagaatgtagcttagaaaacttactggaaaaatgacgaactttgcactttaatgtctcaaatcaatggatacatcacttgatcaatgaatggatgggtgcatcactaaaagggtttgcaagagagacatcgttatgcttttctagtattatgaccctgactgagtttcgcattgataacataaaaaaaaaaagtaaattatactcgcactttatgtgttttacttaaatttcatctattatccctccttttttgcatattacttttatctctttctattaatactgttaactaacgttaattgaaatatgtgagcagataaaattgtatttacattttaatggtaaaactcaaattattttctcccaattagtttcagaatttaggattcacatttcatttctcttcaccatttactgtttgtcttcgtcttgttagcgagttcttcttgagcgtctagggggtacgagttcctctttctctcacgacattagttcaattcctattcactgttcgcgagttattcaccgttcatgttcaagttcacgattcttcattgttcctcttcccgttcacgagttttctactgttcattttccagttctcgcaacgttcacgagcacctccgtttgtcttcttcttcgacgttcacgagcgctctgtttctcttcttcctgttctacgatttctgttcacgccaaggttatgattataagtaaccactagaccttgtatatagattactttttaagattatttatttaattgtgatggttaattgttatctatttctgaatgagtttcaatgaggaccagtttgggaccacttatgatttttaaaatcatttgtttattattgttgattaaaatagtgttgatggttaggaccacataaaacacaatggatgaactggaaatcatttgtttattattgttgattaaaatagtgttgatggttgagaccacaagatcataatggatgaagtggaatacatggaatacatgactgtgtaaacaagccccttaagactgatcatgatgtgttgaaaatgggaaatggtgttaacattatgtaccaaaaaagtaggttcacatctaacaaaaagttgagtttacgtctaattacataaaaaaaaaaataagagtcttaaaatattttcaggttaagaggaagaagatgaaggtattttagatataaaatctcattaaaagtcatgtgaccaacatgtgcctaatttatgttagattattaaacgatgttaggaatgagagagtctaaatgtaatgtgaactaaacaattatgagattttttatagggtaaaaaaagaagaaatatcgaataaaatttgaagaaaacaagtgaggtacgaatgtaatttactctaaaagaaatacttcttacaaaatttcactcataactttcataatttttttttatcaaccaaaggaaaactaatatatcgagggcatcagacatgccaccgaaaaggaaaattacaaaaacaaagaaatgaagaaaagagaaccaaggtaaaaaaactacttaggcaaatgaaaaataaattcttgacaacaactaattgaagagattgtgatttaacgttttgggggccggaaacaattattgcattcttgacattgtcgtgtgacatactctattatgattagttgtacactagtacggatatattcgaatatgtaaaatgtaaattatatacataaaaaataagttttatcaatttatattttttttataaataatttatcaaaaatcatattttaaaaataacattgtatcttttttttaaatatttataatattaattatttaccttttagtgacattataattgaaaaataaaagtttaccaaatattatatcttattgaagtattttatcaaacatttcaatataaattataattttaacgtaatttgcatattttttatttgtacaatagtaagtatatatcagcattttttgtgatgtaaacatagacaaaataatatataattaattgcacatgataaaatagaattaagaaagtgctaacaatacgttttaatatattaatattatctaagaagaatgttaaccacatagtttataacacaatccttctagtatattaaatactatgttttattgaaatttataaaatcttaagtcaaacttattaaatattaagtgagatgtagatatannnnnnnnnnnnnnnnnnnnnnnnnnnnnnnnnnnnnnnnnnnnnnnnnnnnnnnnnnnnnnnnnnnnnnnnnnnnnnnnnnnnnnnnnnnnnnnnnnnnnnnnnnnnnnnnnnnnnnnnnnnnnnnnnnnnnnnnnnnnnnnnnnnnnnnnnnnnnnnnnnnnnnnnnnnnnnnnnnnnnnnnnnnnnnnnnnnnnnnnnnnnnnnnnnnnnnnnnnnnnnnnnnnnnnnnnnnnnnnnnnnnnnnnnnnnnnnnnnnnnnnnnnnnnnnnnnnnnnnnnnnnnnnnnnnnnnnnnnnnnnnnnnnnnnnnnnnnnnnnnnnnnnnnnnnnnnnnnnnnnnnnnnnnnnnnnnnnnnnnnnnnnnnnnnnnnnnnnnnnnnnnnnnnnnnnnnnnnnnnnnnnnnnnnnnnnnnnnnnnnnnnnnnnnnnnnnnnnnnnnnnnnnnnnnnnnnnnnnnnnnnnnnnnnnnnnnnnnnnnnnnnnnnnnnnnnnnnnnnnnnnnnnnnnnnnnnnnnnnnnnnnnnnnnnnnnnnnnnnnnnnnnnnnnnnnnnnnnnnnnnnnnnnnnnnnnnnnnnnnnnnnnnnnnnnnnnnnnnnnnnnnnnnnnnnnnnnnnnnnnnnnnnnnnnnnnnnnnnnnnnnnnnnnnnnnnnnnnnnnnnnnnnnnnnnnnnnnnnnnnnnnnnnnnnnnnnnnnnnnnnnnnnnnnnnnnnnnnnnnnnnnnnnnnnnnnnnnnnnnnnnnnnnnnnnnnnnnnnnnnnnnnnnnnnnnnnnnnnnnnnnnnnnnnnnnnnnnnnnnnnnnnnnnnnnnnnnnnnnnnnnnnnnnnnnnnnnnnnnnnnnnnnnnccagcatgggataactaaatataaataagttgccataaaaaaaagttaccaacgagaagcatcacactctaggacagggtgaaaaagttaatagataacatgtgattatattgttctcattcaccaattaaatatcgggaaattctatttccacgtattgtttgtctgacatcagtgacacggtccacaaaaatcaacctaaacattcaacaagatagactaaaactaggggagagaaataaaattaatagaagaaaaaagtgaatggtaatgcatcagacattgcgagatacttctagataactactattctcttaaatatttggtttaagtttttaaatgcataaagtctaaggtagtgttcgattggtataaaagaaaattaatgaaagtacgagaaaagaatgaatgaaaaggaatgaaagagaggtgaaagaaaatgaaaactatgtgtgatggttagagataaaatagaaatgaaaaaagagaaaaaaatttaaataaaaatgatttgaaagataaaagaagaagaaaaattaattttaaatatatgacatcataattaattttatttctttgatttttctcaatataaaaaaaatatcacatcgtgattctaactaatctcttcttcaacatacaattttcttaaaaaaatgtgttattttcactactttcatgtcattgtagagatgaaagtgtttttatgaatcacactacattttttaaaagttttcgtttttctttcaatacaaacaaacaacaatgaattttaactttccactattttcataccatttcactttcattcctctctttttatgtagaaacgaacaaagtcttagcatgcatcgaaagaaggttgaagaaatagcgaggaaaattttaaatttattgtggatcccttgcaaaaatatttttccacttatatgcgaagatttgcgaagaaatgacctggttttgtgtgttggatcttgttataacgttggctgcatacaaaatagaagagagaggagctcttgtttctcttgccaccacaaaagtgatcctaatttgcatgtttcgggcaccggccaccggccacctcgctagcgggttagtagcacagcccctgtgaagcactgcaaccgcgacagatctcgtcactgcatggtctcgcattcgccaccaccatgaacatcttgtctttatagatctgtgcctgtacaagtgagtttctcagaggaagaaatgcctcacataatcataaattattttattaataatatattttttaaaactatataataataatgtcaataacaacatttttttaaatatcaaacaattttaattcaagtatttcatctctatttccacttcatttatcttctaccaaacaacttatatttttctttatttttcacctatttctcttcttttaacctatctactttcctttcctctatttcttttcccctatcaaactcaaacttaaagagatataatgttttttttttatcataaagaaatcaatggctgtttgagtatacaataataataaaaacaatgaaaaaaaagagataatttatatataataattttgttaactttattttaattaatgattaagggattatgatttttttatatcgatttggtttagtttatttgtagttttacttttatgcaacactttttatatctatgtatcgaaagtaattaagaacttgatatttaggatttaattattagttgtatgcatgaaaaataaaactatatatatatatatattaaatatatcattattaggcacaaccaataataaaataacatgtcagtcaaaatcttaaacaaaaggaaaaaaatgactatttattcggtatgtgtattaatttaagtgggtatcaatacattaaaaaatatattttaaactcatgtataaataacattacttaattattaacttgaaaataccatttatggttagaccgtattttatttctaatttttgattgatcatttatcattaaaaaaaattacataattaacaactttatagttatactcatcctcatcatttatcattactttcataaaatttaaagtttgaaaaaaaatcttaaaacaattttgttagtgcaaggacaacgaacttagagatctaacaaannnnnnnnnnnnnnnnnnnnnnnnnnnnnnnnnnnnnnnnnnnnnnnnnnnnnnnnnnnnnnnnnnnnnnnnnnnnnnnnnnnnnnnnnnnnnnnnnnnnnnnnnnnnnnnnnnnnnnnnnnnnnnnnnnnnnnnnnnnnnnnnncataattaacaactttatcgctatactcatcctcatcatttatcattactttcataaaatttaaagtttgaaaaaaaatcttaaaacaattttgttagtgcaaggacaacgaacttagagatctaacaaaaattcttcccccgattccttaataatcaacaaatttatagtannnnnnnnnnnnnnnnnnnnnnnnnnnnnnnnnnnnnnnnnnnnnnnnnnnnnnnnnnnnnnnnnnnnnnnnnnnnnnnnattatatttataaggcctcataatttatataatttatcctttttagaactatttttctcatgagacaattttatttaaaatacgatcaaatattaaaaatgaacacatctctcaacaaaaactttaatttactatattgtaatacttaaaaagttattttttttttcatcaaacaaaatccttatattacagttgtattaaatattcaaattgaatactttattatcctccatattattcttatccaaccaagtaagatatttttaaagaaatatctgtagtctatatagactctataatatatatatatatatatatatataaatgtttgttttaatttgtttgcagagaaaagaaaagaaacaaagagtggtgtcattgacattttggtgttgttgggcacctctgtgtctctctccgatgggtatatcagcttcttcccattcacttcatttcattcacccctttaactgtcatccattctttctctctcgaaaggacgcaccagtcaaaaaacaaaagccgttccagcttgaggggcaggggtaccaccaccaaaggccaaaatacaaatcaaccatctcaacgaatatcctcttcgatccctttctctatttccttttctttattatataatcatctacaaactcacacacaccccctctaaatacttcctttacccccctctcaccttaaaacaaacaaatatactactaatagtactacttcaaactttgatatgcaagtggcggcagaactccaaagcacccatcaccaccaccaccaaagacaaaggcaacaacaagacaccacccccatgtgccgccaaattcagctcactatctccgatcacaccgtcgccggagacgccggcgctgacgacggcgaggatctcttcattccgcccctcaacttcgccatggttgataatggcattttccgctccggcttccccgaacccgccaacttctccttcctccaaaccctgggcctccgttccatcatgtctgtccaatcatttcaatcaccctcttctaccttttttcttatgttgttgctgttgttaatggtgttcttgttaacattcgtgtttgtgtgtgtggttgtgtttgagtttgatgatgctttttgagtacccaattgattaattgtgagtaaagtcttcatcttttcctcgcacgctgttgctgattatttgattgggtgttttttttttttttttttacagatatctgtgtcctgagccgtatccggaggccaacgtggagttcctcaagtcaaatgggatcaagctttttcagtttgggattgagggtcataaggtctatttctatctatctatctatgtcttcaaccttcttttttctggtcttgtgatttctcaccttccatttgggtctgattgttttatcttgaggtctatttgaataatcttgtctataaggaattataatcataaaagaagatgataaagagataaaatgaattcagcttttcgtgcaagactaagttaaaatcagcttagacacttcagccttttcctgtaagtcaagtttttggagaagtttttaaacttttcttattttcttattgaatactaagtgactatacaagaaatttatctaaagtctgaatttgattgtggttgttctatgtcttggtaatttgcacaaagttcacaacaaaaagaaaaatgaatagctggcacagagatcaatgaatatctaatccaattgacctgtctttctcattctcttctatattcttaatataacttttctatctctcaagagatgggtgtggataattagtgacctgatgaactgggaccattatatggatgctttggtttcaagtactgtttaatcaaatgggttgttatgagagggcttgggagataaaaaaaggggacgtaaagcgggttgttgtcattattatttattcaacttgtttacttactattcttcttcttccttctccttctattcttgcttgattcttatggcgtaacttttttgaaatgtccctaactttataagactgatacgaaagcaaaactacttcggcaccctgcgagtcttaaaaaatgaataggagaatgatatggtccgttagatatgaacattctacaattaatggccaaaataggtaaggatcaccatggaaatacaagcactggatttttttaataaaaaaactctttgaagccccaacccaccgtccctttccttgccgaccgcttgacctttcctcaccatggacgaccacaacgccatcgcatatcccgctgccgccatggacgaccccgacgtcgttgtgcaaccgagaatccacattagatcaaattattttttttatttttttctttccgtccatttagaccaccgtgggcattctccaacattctcccccggatgatctgccacgctttgccgatattgaacaaacaagaaggttccattcattgttcgtatctttcaaaacaaaaattcaagataaataatacccattacagacgaatctgcaatgaccaaatgttttacggtgtgaaatttgaattctaaaaatttatccagatttacaaaattttgcaacagaagagttggagtttggttggaaggcaggtggaatgcgaggcagcgacagaggagcgcgtgagggaggagaaggtgaaaacaaggtcatagattccagatctgttgtttgagaggccatggatctgaggagcgagtccattttcagatctgaagcatgaagtgtgtttctagatttgacgcatgagtacgattgcagatccaacgcatagcgatgacggagagggaggtggaggtcttcgacacgccggactgacgaggatcctgatgttgttctttttgttgttggagtgtgtgggtgttaagtcatttgtcgaaagggggaagattttccagtgaaaaatatcaagccgcaagggagacacggcgttgcagatgacaagtgatagagcagcaacgtttccttgaagaagatgaaggcctcacggtgtgaggctgaacttgaccatgaatggtgtctacgacgccggtgaaacaacggagaaaacgaaagaagagtagacgtattctgtttttttttttttcttttttcagtgtaagcatgtcctctgtaatgtcagcaacagttgattgcatttaatgcaccgtattaccccacggtgggaaaggagtttctccatagcatctccaatggatggtgggtttagaaaccgtttcttagaccaatggataatatgagagttcattttaaaaaaaataaatttttaatgtaagaaattctttctagtttttacaatttcttattttttcgaatatcactaatcgtggagattttgtggagtttcttatattagaacaaaattttgtaagaatttttcatgaatgagataatatcacgtcagttttggtctccatattgttccggattatacgttgttttatttcttgagcatatttctatgcgagagtcctcttcaatcctcactcgtatgtgcacagtgaaattatgtcataccaactttaggatatggaaatcagggttgatggaatccaggctggcatgccaagtctttttccttggttatccaaaatgatcacaatcatttgtttttcgggaataatgaacagttgggagatcatatattatacgtgttgtctgtctaatgggaccattatggatatctgaaaaaccaattctgttcaagaagagcacagatttgctatttgattatagtgcaagtacaaaaagaagggggaagggaattaataattgttcagaagtagcaccaaagtcatgatcaccctaggaaagactaggtaatcaagaagggcatagtaaagtatagagaacatttcattattacatttggagattgaatttatgttattggtggatttgggcatattgtatgttgaatttgaatgacttctctaaagtgatgttctctaaagaatagtgcactcacaacccttgattagaaaaatgaaagattgccattataattaattttaagatttgttatatatgtatttgaatttatcaaaattctcaactgttgattagaaaatcaacagttgttggtgtgcgctttgttctctaaagtgtatatccactcactttcactttagaaaaaccatagaaccgaattcattgaattaatatagagaatacttttcctttatattgttgaattcctgactctctattccatgaattttgtttgaatattaaattatggaccaatctatatgtgaagtaaaacaaggggaagcagtacttttattaaagccatccttgattatgatactaacttgtgtctctttccttaattttgaaattgttttcatgccttttttgcccatcttctaattttcatgtttattcacatctgactccatctgtggaaaggaagatggtcagatgaatgagaattgagtgatggtttatttctacatgcgtgtattgtgtaagatttaggtctgtataccagtaaaaaaaataaaaattgggatctgtatagatacattaataatctaataatagcttcttttggatcccataaatcgttcagtcaatcaatattagtagttgataaatttgccaaacattatcctcaaattgtattagccacacggcccacaccctctcccctcttccttttttaccaacaagtttagttgacaaagggtgatgatggaacttgattttaattttatgttaagaaagcaagttttagataaccttgaaatcttctttaaccttgtgcatccaggagccttttgtgaacatcccagaggacacaatccgtgaagcactagaagttgttcttggtatgatgtagttctttacttttaatcccaactgcagtttcaacaactcatttaattttgctagcaataacttttggcgatcaaataatgcagatgtcaggaaccacccagttataattcactgtaagcggggaaaggtgagatttttgctgattttttttttataaatatttttgtaataagtaatagtgtcactaacaatataaaacgtttttgtaatatctacccatgtgagatttcttgttaaaagtatgtaatcgcttcctttttttctgcatgcagcaccgaacaggttgcttggtaggatgctatagaaaattgcaaaaatggtgcttgtcatccgtctttgatgaataccaacgctttgcagccgccaaagccagagtttcagatcagaggtttgtagagttgtttgatatttccagcctgaaacatttgcccatacccttttcatgtttgaagaggtaacataaccaagctatgctgagttgggtttactttctttagtttgtgaaagtgaagccaaggttcttcctttgaataaataggaaaaggtgatgaactccttcaatgcattgcagcggcaaaggaataattcttctcccattttcaaaataagacaagaaaattctaggaataatagagcattacctgtatttgtatgtgttaaaattctgccgtatatttcccttctctccctacaattggcccttagtgtacctcaccaccttttgttctattttctttctctttgtttttatgtttttcttgctgctccccattcatcaacaatgagtgtagatatatcttgattttttctcgaggctcagaaaaattcaagaaggctacaaaaatgccttgtttgtctacccaaaatcttggtgggtagtaaagcagaggaccttataaaatttcatttgctagattaatattgcttttcttattttatgttgacactagcccagttcagtgcgatggttattctcttacgctaattgcatgctggtggaaaacgtggcagtgttttgtagggacttacatatacttgcattttattataaaatataaatataagtggaaaatttatgcactttgtaagcagattttttttaattccttttataatatctttttactcatcttatttatttattttatgtttgtttttacgaagtatttggaggattaagtttaccaatacatttttggtaagaagatatatataaaattaaagcagaagggaacttaacatacaagaattttgttagtatgaaaaatgtattttttatttatgtagatattcacaaacttttcattggatcttatttgtataatgtctgtgataatgacaggaagatacacatattttgcatgagaatgttatgaaaaaaatttaaggtgagaaattttattgtgaacgtattaaaatggagtgtcaaaatagcaataattgaaagggactaaataaatnnnnnnnnnnnnnnnnnnnnnnnnnnnnnnnnnnnnnnnnnnnnnnnnnnnnnnnnnnnnnnnnnnnnnnnnnnnnnnnnnnnnnnnnnnnnnnnnnnnnnnnnnnnnnnnnnnnnnnnnnnnnnnnnnnnnnnnnnnnnnnnnnnnnnnnnnnnnnnnnnnnnnnnnnnnnnnnnnnnnnnnnnnnnnnnnnnnnnnnnnnnnnnnnnnnnnnnnnnnnnnnnnnnnnnnnnnnnnnnnnnnnnnnnnnnnnnnnnnnnnnnnnnnnnnnnnnnnnnnnnnnnnnnnnnnnnnnnnnnnnnnnnnnnnnnnnnnnnnnnnnnnnnnnnnnnnnnnnnnnnnnnnnnnnnnnnnnnnnnnnnnnnnnnnnnnnnnnnnnnnnnnnnnnnnnnnnnnnnnnnnnnnnnnnnnnnnnnnnnnnnnnnnnnnnnnnnnnnnnnnnnnnnnnnnnnnnnnnnnnnnnnnnnnnnnnnnnnnnnnnnnnnnnnnnnnnnnnnnnnnnnnnnnnnnnnnnnnnnnnnnnnnnnnnnnnnnnnnnnnnnnnnnnnnnnnnnnnnnnnnnnnnnnnnnnnnnnnnnnnnnnnnnnnnnnnnnnnnnnnnnnnnnnnnnnnnnnnnnnnnnnnnnnnnnnnnnnnnnnnnnnnnnnnnnnnnnnnnnnnnnnnnnnnnnnnnnnnnnnnnnnnnnnnnnnnnnnnnnnnnnnnnnnnnnnnnnnnnnnnnnnnnnnnnnnnnnnnnnnnnnnnnnnnnnnnnnnnnnnnnnnnnnnnnnnnnnnnnnnnnnnnnnnnnnnnnnnnnnnnnnnnnnnnnnnnnnnnnnnnnnnnnnnnnnnnnnnnnnnnnnnnnnnnnnnnnnnnnnnnnnnnnnnnnnnnnnnnnnnnnnnnnnnnnnnnnnnnnnnnnnnnnnnnnnnnnnnnnnnnnnnnnnnnnnnnnnnnnnnnnnnnnnnnnnnnnnnnnnnnnnnnnnnnnnnnnnnnnnnnnnnnnnnnnnnnnnnnnnnnnnnnnnnnnnnnnnnnnnnnnnnnnnnnnnnnnnnnnnnnnnnnnnnnnnnnnnnnnnnnnnnnnnnnnnnnnnnnnnnnnnnnnngctagattttgtaaaaaaaaaaaaaaaaagcaaaaataacctaaaagaaaaatttagagtaacaataatgagtattaccgtttttgcttaagtatgtaataatctcaaatgatttcttctcgccgatctaatttcgcaggcgtaaactacctttttgctttgctgttttcttttcccttttctagatttctttatggccactggtctaactgaaaaaatgaactgatttttcttttttgatatgtaatttctttataggttggactaaaattaaggaagggcaattgcgatggtgtgagctcatatttcacactcgagcaaagcatgtgacatttatctgagaatgaagttacatgcactctgctgaaaatgtgaagtaaagttttgtgcggattgattgagcaagaccaactaccatctctttgcaggatcatgggttcaatgatgtctctctagcctacgttggagttgaatttctactcttcttgcttatgtagttgggttgggtgtcctagaagtttgcactgtgaatcattttgatttttagcatatagttgacatgtgtaatggaaatttagatatgtaggacataacttttatacatatcatattgagttgaatggtttaaaagaataaatgttaatattttcatatttacattttatattagttttatgctcacacattttaagttaaaaggaaaaaagttttactatagaaaagtagttcaaaatatatatatacaaaaaagagaatgcaaaaatatatatttttaaaaatatttaaatatgttttcattccttcaaaagttgaattgttttctttttattccactaaatttaaagttatttttttagttcttgaaattcacaaaatactcttttagtcctactacataatacgagccaaacatgaaataagaatttcacaattttttaatagtcaaaatttgattttctattttacattttaaattacactcttggtgattaaaaattatcataatcaagttagtaaaaaattaaaaacctatcaaacacttaaaaaattactttaatttttttattgacttaattttaggaatttcaaaccaccagaaaaattatactttaaatataaaatagaaaattaaattatggtggtaaaatttataaaaaaaattgtaaatttcttattttctatttgacttacattttataaaagaacaaaaaaatattttatgaattttaaaaatttaaaaagataatttcaaatttaaaaactaaaaaaaatacacacatttaaaagattaaaaacatatttaacctttttaaaataaacgtgataaggattctatatcttaatattggcgatggaaaagtttgaatatcaaggagtagcattgtttccattacacatcatttagctttgttgttatttatttcggttgttacaatcaatcatgccccaagcccaccatctccaacgtgcctcgagcaatcatcttcacattcacatatcttattattgttgtgaattttttgggttctatttgcattttgttggacatacattggactggacccgagactatgtttctgattgggatttaaatcatgcaccttccaaatttttaaaaatctcaaattaccctttttaaattatatcattttggaataaacactttcaaaatgggtattttatttagtaaaaaatagatttaccttctagagtaggtgttctataacaataaaaaaataatttttggaataggtgttccataacaagaaaaaataatttctagaataggtgttccataatagtgaaaaatagctttgccttttaaaataggtgttccgtaaaaaatagttttgagaataaacgtttcataacaacaaacaataagaataaattccagagtacgtgtttcataatattaaaaaatagctgtcaaaataaacgttccataatagtaaaaaataaattccaaaatagacgttccataataacaaaaaataactgtgttccataataataataaaaggatagttaatattttcaaaacagaaagggatgcaagatacatatatgcaattgctggattcaaatccctttgtgtttttcctatttggactgcctcctagtcctttagattttggatgtttatatattgggtttggtttcattaccattgggctgcatacctacaatatagttattataattccttctctttatggcctctaacactatggttggcagggtaaaatttgcaacttcctttctcttttcagtaacatcaggccattattgataatcaataaaggcttattaaattaaactaattaaaaaaattaaatataattttgatctatgaaaaataggatcattttgattttggtcctttaaacttttttctttcaattttaattcccgtacaatttaatatttttgattttattttttattgtcaaataacaacgttaattattaatcataataataacatttacaattgagtgaattatcatgttattaaagagtatcactaattcaaaacataatttactaaaaacatatctgacatattaattatgtttttttttaatgataaactatgtttttaaagtcttatcctattagttaatattgtgataagtcactagactattaaagttcatattatatcatcaattaacattattaatcgacagcatagattaaaacaaaaaaaatactaatttttatgggaactaaaatcaaaagattttttttaaaggaccaatttaagtctactgatgatactaatatttttaatttgaagatgcttaaaagtgagttactcaattttttttccaaacataagagtcagattcaaaatttggcctccttatcctaattcatctcaaagcactgaatttaaaggtgggatttgcatctaggaaagatagctgaagacttggaccattgattagtctcaattttcaactatttataggctcattttcttatatataaatcatcttgtgctggaatatttgagtagctatgcatagttgtcaagagctggttttcttatcgtttgggaagcatggccctttcaacatcttttcttgctgtagtcataactcctttgtaccagaggaacacgggttgaagtatttcaaatcattgatgaatgaaaatactcatacggtagtggccatgcaatgtcagacttttaatattttagttgagtctatcagtagggagcactcatacggatcaaaattggtaaggtatatgagtatgatctctgatatatactattcattcccatattctcgcgtattagtatattacacataatatctgtatgttgtatgaatttatttgaatgggaaagacaacataatttagatatgtaagaataagtgaatatttatttttggttttaatactattttgcaaattttctagttatgccactaattagttattattcatctaaaaaatagtcatttataaaggaatgatcaatactctttctctgtgatattttcgttttgcacataatgtttaaaaattgaatatgcactatgagtaaaatactcattgacttaaataaatattaatttggtatttttgtttaacataaaacatttttcttcttagaattttagtaatttttttatcattaaaaaatatgaaataaaaaattggggtcctgagtaataattggcatccctaattattataactggaccaagcagcaagtgattcatatatagtgactagaggaagtggtccaaatcgactcccaagatctaaggacacatgcacgaaaaaggagcagtggtggatctaacactctgtactctgtatttgagcaaatgcgaggtaggttacatggcccaaaaaagcacacataattgaaggtgggtccaatctcaagttctggagaggtcaaagtgttaagatttataattcatcagccttttagaaaagctgctttatgaattatgaataatgtttccgcaaccctaaagataaggaggagaacataataaattaagattgtgacttctcataattaacctatcgtacttttttatatatttggagaataatttttttttttatcttttacaaataaatttatactgtctcatattttcaaggatcaaaatagattgtccataaaagtttaacagttaagctttgtcaaagagataaataactgttatattaatctatgtgctatattccaaaagaaaagttaggaacaaaaacttattttctcttttatctctttttcatagtattttttatttctttattttttcatcatatcacttattatatctataataaataatatgggcactgaacttaattattctcaatagtaattggttcatttttataaaaaattgtcttaaaatttatttgaaagataattttccattgatttattgtattttcttttacaatgatagcatatgcctgttaaactaaaaagaaaagataaactaatgaataatgcaatataaaattaagagagaatttagaaaaagaatgtgaaaagtataagaaaaaagtacgaaagtagcaaagtcaagaataaaaactaatttaatttttcaaaagtctataattattttaatgagtaatttatttatggagaaattctatcaacttttaaaagaaataaatataaaatatgttaaaaatgatgttctaatcaacatcgttatcaacatttatatatttttgtctgcttctgtcatccgcacctctttttaaatgtcaaaaaggttgctttcgcacttaattatacacttagcacaagaaatgaagcaaacctaaaaatcgtgagaatgcttcccttaatataggagtataatcatgtgacgtgtttcaattcctttctatctgcctgttttggctgagacatgcatttccttgttaatgtgtgattatatgcaaataacaagtttcaccatatcttcacattcttccacttaagtgctaccttttctactttaaaagtatgttataaaaagatgggttctccactttccccaagttgaatacttacgtggatgccaagattctgtcttataagagttaattttaatatatatatatatatattaaataatgtgatgtgatgttacgttgatgtgatgttgcgtcgaacgtgtatcgttcaatatgtccaatctttaatttctagacttatagtctcttctttaaatttattacatgttcaggattattatcttcttaaattttagttttattactttttataaattaaaaatctcaattacatgttagtgaatactgggacgtcgctttcaagcatgtatttaaggagtcattaccatatttcctttcttaacctcacaaaagtaatgaccggatttctggggtaattgttattcagttcgcttctttgtccacccgttgttaaaaatacaaaagttttaattagaagataacgtcacaaccacctatttttttactattcaaatttcatcctgactaaatatgcttccttggaattgaatatcttcatttcgttgcatccacatattcctttgtcctagtaagtgtgtttgatatgcatagtcttcccgaagcaccatcggggcattcacattctcatgtgttctacatcacttggacaccatcattggtggcccaaaacccaactagccaatttgaaactcatatgaagccaaaagcaagaaagaggaaaagaaaataatgcatatagagccaaaagacaattcatagcttttgctagttaaatagttatgtttttattatgaaatatgatattttgttgaccatttcgcacagtcataaatcacttcaactttgtgtgaacgttgggcaaaatttattttacaaagtttattttagttaaaattgattttaaatttaagtgagtgatgtttagatgctttttattttaaagtaataaaattaatatgaacttttcaccaaagcaaaatgacttaaaactatttcaactcaaactatccattctaaattcaaaattaatttcttagtaggaccgatgtgaaatcaaatagacacataacaaatataataatagtaattttattatattcttttagtaaacacatgcatcaggtacttgttacactcctcccaaagcaaacatggtggtaaggctatagtaaaaatatttaaacagttgcaattggaccaaaatttgatgctttaaaggcttcaaatcttggctccttggcctggaacttcaacttagcatagagcttcatgtagtcttcaaacacaaatttagggtagagctggcttttctcctctgcctctttctccaacaattctggagcagggtagatgatagcatcactgccagggttgtagaatgaggctatggacattctggtcccatcagtttgtgctatcacacggtgctccacactcttgtacttaccattggtgataacctgtttttccacccattagtgtttgatatgagtaattttgttgcatctaaattgtttgtagaaatgtctactaagcaatatatattaaaatcaaccaattaaaaataatcttatgtaccgttttttaaagtagttattacaatagttgataatttttaaatatataataatttatgattgaatggcagtataatttttttttttgcattattggtgagtctaattaaattcatatattaaaagtaataggaaataaatttacctcaagctgatcaccaaggttaacaacaatggagtggcgcatagggggcacatcaacccactggccatctttgagaagctgtaggccactgaccttgtcatcctggaagagaagaataatcccaccggcatcggtgtggggacgaagaccctttaccaggtctgggttggggcatggagggtagttggcaaccttggtgccaaaagttggtcctcttgatccatggaaagccttcttgaggtaccctttctcaaggcccagattctcacacaacaagtccaacagctgctctgctagtttctctaacctcaaagcaaaatccttcatcaccttcctgcaccaattacctcatgttagaatcttgtaaaagagataaacacagctgcagtttcaattctgaaatgcacagtcgtatcttgtattttatttttttggttttgaactcattatttggtgaagtacttgtagatactctaaaagaaattatgaaacagaagtaataatatatatatatatatatatatatagcaatgttcaatcttaaggacttctgctcttatccattttgtcaagtcaaaatcaaggtgcaaattctgtgtcagttatttgggactttgtgctaacttgtatttgtaaaatactgcatgtcatccaaatcacatgcaatattgtgtaatgttataaatgttttgttttattgtaacctgtactcatccatgagatcagggatctctgagatgtttgattcagggaggtgacgcaattggaaggtgctctcccaatccatgtccttgatttcagtttggacagcatctagacctttgcttgccataaattccttgaacctctcttccatgcatttcctgtagtgctctttggtcaacctctccatagtgtccaataggtcatggggtatgccatgattcaccagctattagaattttgaaagcaatcaaacagtaagaagagacattattaagtaccaagaaaaatcacaaggacatttatttggtgggcaatgtagaaatgaatgaggtaagaacaggttcttgagatacctcaaagaatccccagttttcacaagcatcctttattttctccatggtgtcgtttctctgctcaccattgagcttctccaagttgatcactgggaagttagtcatcttttgaactcaaaactcagctcttttttctatctgcctctttctctattgcagtattgctctgtgcagattagagtttgctagggtggtatttatagaccttgagaatataagaccaaccacaaaaaaagaaaataagaaaaatctcgcttactaataaaaagaatatgttgtaatttgctttctattcacccttgtttttaatctatgatttttatcctatagaacaaccttttctttatggttccgtggttgaattgtcctgccactgtggtatgtaggttggacccacttggtggctgatttgacctcttgacaatttgaccaggactatacaaactgccaccacctcctatcaattctcaaatattttacttcgacctttatttttgggtcatatgaacgtgatttctaggaaggagcttagccaaaggagttccaagattatggtatccacgttttagaataagcttggaagatgaatttgtattcctctccacgtgattaattacttgcatatttttcctaattaggagttgcttgagccccaaaaattggtcagatatggaatagttactaagggtgttgtgtatgcaaatattcggttaatatttcatctagattagaaatttctaaattaaaggaggctcacgaaatataaaatgttttggcgtccattttactcaatcaagcaagttcattcttcatggtgcatatgtaacaaaaagaaaaagaaaaaaaagaaacacaaaagttgtggtccttcaattcttaattaagagcttccgtgtcattcctatccatgatttagtcatttgtcaaacatcttttttcattttatgttggaatcttaaggtaactttatttatttcctcctacggtttcatgagaagtaaaaatggatgaggagataaaacagtatataagtagcattttagtttggtcacttagagtaatagatgaggataatcttttaaatgtgaattttgttgaattattaaaatctgtaatgcgtgcagaaattgttgcttaagagcttgagtcctgaatcacttactgctttcgttgagcaattaaatatcaagaaagttgaaataatatgaataactaattggaacggttaatgattctgaatcagagcactttcttgatgtaaatctccgtaggcattaggaacctagtattgtgaggatggtgagcacggacattgatcaaattatctttgagggtttataagtatcaattaattttatatgcatggaatcctttttctttattattcaattacacttttaattcctttaatttgcattgcgtgtgttttataattagtctttcaagttttttgtgcgtgctcactaaattattcaaattttaaaattaaataaaattggtaatgttatttatttttggctaaaatacatttttagttttttgtattttttttattacattcagtttgacccacttatattttaaaaaaataataatttaatcttttaataacttaataacagaagtaagactattttcacttaaggaatagagcaaagaacgtatttgttaactgattttaacatcgagaagtgatcaaatagaatatatattatacgtttaagttaaagagggtgatgcttggtaaagtctaacctccggcaagatcattatcattttaaaaactcttgtttataactttgttttaactacaaaatcacaaaaagagtattttaactaacatcaccttcacattgtttggttgcatttatattatttggttcacctgccaaagagaggtaacagagactaaatataattaattttaaaagtaaaaggactttaataactcaatattttttttttgaagaaacaaaatcacagctttacatatataattaagacagtgttgaaaatagtctaggaacaattttttcctccaaattgagagtattattgtaaataatttaggaattaatttttcacattttttttcttcatttaatcataataataagtttttacttttaccaaagcctatgtataattgaagatcctccaaatggaaggttcatcctattcaaaacatgtcacatggtattaaatcaaatagtagtattaaattaaaatgtttgtctgtctaaagaattaaatatatgacgaatttaactatattaggtgttaaaatagttttcaatgcaagtatgtcttttggggatctcaccctaatgtgtgtgtctttactttgcaaaaaatggcgggaaagttactgatggctgttggtaatgttcaattgacgctgcatgcaaaagaacaacgcttatttacagttggtcatgcagtggccttgtgatcaaccctaaaaattcttatagctaaaaatactctttatgacaaagcctcctacacattttcatttgcaaaaattcagaaggcccttggaactagggagagtttatcccagtgggttggatgtccagctaggtgccataagtaacgcgccaacaattaattttgatagatacacaatacttttgttttatataaagaatttgatacatacacaataaagtatcctttgcgttcaactatattattaattgtctattgttgacaacccaaaatcagtgtggactaaaaatatttgagtagaacgatgactcgttgtgtttattgattgcttctatatcaattatgtcatttgaaaaaattaacttcaacatagctttctctttagatggatgacaagatgctatcagcgatttaacatgaacgatatcgtttagccatgcgttcaggaaaaaagaaagcagtttttgtctctcttttaaacgtttgcgctaatttcattccattctttaatttagtaatgattgtttttcgctgttttgattacaatgatttaagaatgattcgctatcaattaaacaaagaattgaattatcaaagttttttaaatgaaccctaaaggtcagatagaaaactattcaaatctttaattaatgtaaactagccgccattaaagcctttctttatttctctttcctttctccttttgacgtggctgctcttagtgttagatttagaacaatgctacatccgaaagttgcttgtgatggtttgctgtttgcatgcaatttgtgcttttttctttatatatcgacattaataagagcgttttaacgaaaatcgactttctagcttccttgattaaattgttttactccgttttatgcttctacgttaattaagttggaaacgtgcacatctttgttactagcttgttcattctgcgtccttataaatttgctcaataaatttttatctaacgtttcatgatggaaaataaaataattttgttttgatgacttgtagtagagtggttgatttattccctaccttgatgttggaaccggacgatgaaccaaaattttaatatcaaaaaaatatagtcatacctaatatttattttttaaagaaaatattgtaaaaatccttcaacactagattttatatttgaaagtcgattatatgtaggaattatattaacacttataatgtccgtcataaagagggtacaaaactaagataaatttaaaagcatatttatttttaaaaaaatagaaaagaataatattcatttagaatgaaaaataaatgatggaatttaatgtttctaaaatgggtttggactggttggtctgacactgaatcaacctaatctatcataactcagattataccatattgattaaaataactgacttaaaaatataaaaaaaatacaacttaattttaatagtttaacgtttaaatgagtttgacctgttacgtcatgtttagtgtgcgatataatttttctaaaataagaatcgtccttctttgggaataaataagaaaaaaccttttacaaatatagtatatatagtaccctcacctctctaatgaaaatgttaatcactaatgaaaatttaaaaaaaaaaaaactttttaaactgatttctgatttatttgtagcaaattagtccttattgtgtaaatcaattgtcgacatataaggtgttaataggccttattcaacaagcgtgacactcgttgcctttgacgattcattaattaactagaatatattttgaaagtttttgtgtccatcaatatcaatggaaaccaaattaatgcctaatcaaactggttagtatatttcggttgtgaaacacatgaatcaaattatatactcacacgaataatttctgcttttgtttttttccgttaagaagagaggcagctgcatgaatggctactatttttccccccttatcttgatcataaaatattaaaatgtatgcgttttgcctatgtctcgtgttaaatttacgtatggctgacattttttgcttccgaaagatggataagtatttctacgtacatagtatatattagaaaagccaaacatttggttggtgaaaatgttgataattagggtctattagttctcatcagttttttttttttaattactaatgaaaatttaaaaataaattttaattacttttttcccattaaattattttttaatacttttgatcctattattatttaaatctttaattatatcccgagtttttttaagagaaaaatattccgtgtttttaaaaaatagttcagttgaattctttacttttaaaaggttcaatttaagtattttattatttaaaatagactcaattgatctcattttataaaacaataaaagacctaattgaacatttttaaaattacagtatctaatttaaatttaattaataagaaaaacaaattgaacctaaaaataaattatacaatgacaaaagtaattatgacaaaagtaattaaacaaaaaaagtatatcaacgattgctatttacaaattattgttatttttatataattataaattttaacctaagacctcaactaaactcttcacaactagatcgaccttaatcatttttttatgtaaatcataattgacaaatgtgacttgataataataaaaaattaaaaagtaaaagtcatgtatatcaaatatgaattttatttttcaatataaattaggtcatatttaatatacacaatatatataacaacgagcggggattggaggacgcagaaacatgcatgtttctggctagtggctccaccatcacagtcgcagagaaccactgctgcagtgtgcactcgcaggttaaccctacatgcatgtccaacgtgcttctcagtctttcccaccatgactatgtttcaggtttgcaaagaaaatgcacatctcactttctatgtacccgtttttcctttctaaggtaaatgcgctgtgatatctccaaacacaattctgaacaagattttataatttatcttatgttagccgtattaaatttatcatacattttgaataattaatttggtgatagttatatatatagtctataaatatctaactacaaaaagctcttcatagaaatgttttatttttatttaaatttaaattcagaatttaacattttgatagatgatctaaaacaaaatataaaaaaagtacattcatatttttgaattttttgttgacccgaataaacatagaaaaagacaagtataataatagaaaaaaaattaaagcttgtaaaataaaataaaaaatgaaattaactattcacattatatatttatttaattattatacttatgacaaattaaaatggttaatatatcagtgaagtgtaaggactcatgtactagttaacaatatttcatgttacttttagatcaatttatacagaaacagtttgtccatatgaactaaatagatataccaattgtttccttcttttgatttcttcaactacaatgctacaaaaaggagacaaaaagaagaaagattatagctttaataagcgtgccttttaagaaagcacttagataaatggacatataccacttgaaacacgacgatatgtaaaggcttcgacagtgaattaagcataattaaaacgctataaaaaaaaatcttggactataacaattaaaactgtacatacaaaatttctgatatgtaaattgtaatacactctttatggaggacatttctagtgagagagggtattttattgataaattacattaattatccctgaaatttcatgtaattatacaagcattcatgttttttttaatcataacagttacctctatatactatcccaattatgtaactaccattgtagatatagttaagtgtgcttttcacaagtagttggatggtatcatgagcctatttagttatatnnnnnnnnnnnnnnnnnnnnnnnnnnnnnnnnnnnnnnnnnnnnnnnnnnnnnnnnnnnnnnnnnnnnnnnnnnnnnnnnnnnnnnnnnnnnnnnnnnnnnnnnnnnnnnnnnnnnnnnnnnnnnnnnnnnnnnnnnnnnnnnnnnnnnnnnnnnnnnnnnnnnnnnnnnnnnnnnnnnnnnnnnnnnnnnnnnnnnnnnnnnnnnnnnnnnnnnnnnnnnnnnnnnnnnnnnnnnnnnnnnnnnnnnnnnnnnnnnnnnnnnnnnnnnnnnnnnnnnnnnnnnnnnnnnnnnnnnnnnnnnnnnnnnnnnnnnnnnnnnnnnnnnnnnnnnnnnnnnnnnnnnnnnnnnnnnnnnnnnnnnnnnnnnnnnnnnnnnnnnnnnnnnnnnnnnnnnnnnnnnnnnnnnnnnnnnnnnnnnnnnnnnnnnnnnnnnnnnnnnnnnnnnnnnnnnnnnnnnnnnnnnnnnnnnnnnnnnnnnnnnnnnnnnnnnnnnnnnnnnnnnnnnnnnnnnnnnnnnnnnnnnnnnnnnnnnnnnnnnnnnnnnnnnnnnnnnnnnnnnnnnnnnnnnnnnnnnnnnnnnnnnnnnnnnnnnnnnnnnnnnnnnnnnnnnnnnnnnnnnnnnnnnnnnnnnnnnnnnnnnnnnnnnnnnnnnnnnnnnnnnnnnnnnnnnnnnnnnnnnnnnnnnnnnnnnnnnnnnnnnnnnnnnnnnnnnnnnnnnnnnnnnnnnnnnnnnnnnnnnnnnnnnnnnnnnnnnnnnnnnnnnnnnnnnnnnnnnnnnnnnnnnnnnnnnnnnnnnnnnnnnnnnnnnnnnnnnnnnnnnnnnnnnnnnnnnnnnnnnnnnnnnnnnnnnnnnnnnnnnnnnnnnnnnnnnnnnnnnnnnnnnnnnnnnnnnnnnnnnnnnnnnnnnnnnnnnnnnnnnnnnnnnnnnnnnnnnnnnnnnnnnnnnnnnnnnnnnnnnnnnnnnnnnnnnnnnnnnnnnnnnnnnnnnnnnnnnnnnnnnnnnnnnnnnnnnnnnnnnnnnnnnnnnnnnnnnnnnnnnnnnnnnnnnnnnnnnnnnnnnnnnnnnnnnnnnnnnnnnnnnnnnnnnnnnnnnnnnnnnnnnnnnnnnnnnnnnnnnnnnnnnnnnnnnnnnnnnnnnnnnnnnnnnnnnnnnnnnnnnnnnnnnnnnnnnnnnnnnnnnnnnnnnnnnnnnnnnnnnnnnnnnnnnnatatatatatatatatatatatattaaaggaaacttgaagatttattggttgttggatcgaaaatttaacttgataataaactttgatttaattcaataaatatctagcatatttgaatatttatatataaacctttagatcaagattttaatttcacaaccaccatggctgtgggaaaatttattgtaaatttttttatagaaattttatggcatatgtagaaaaccaacgtatgatctcctgcttaaaagtcacacccttttttctatttttcatgcgagagaggtctttttccataattcacattcttgtattgaggatggcggactgcagccaactgaggtaagacaaattttatattttatgccatgcatggggattgaatccaccccgccatgtatggggattgaacccacgccacgaccatattaatttttaacattgttaataatgaaaatttatactaattacaaatgaatatataataagtaaaagaaagttcaattacacgttttgcttgattcaatattttttctctttttacaaaaagaaatcagttgacacaatttatttcataatatcaatagtcttaaattgcattatatttaaagcttgattcaaaatttaaattaaaaaatgcaattgtttaaagatatgaaaaaattgtaatcaatcatcgtttatcaaaatattatataaacaagattgtgatttttaaaataccttaatccatttaattttacaattatgtaaatttgaaaataagtaaaatggaatttcagtaattttttaattttttttggttagttgctttctaaagttgataccacttaataaataaaacagcttgtttatattttcgaaaagaaagtgtaacacattttgacttaagtttactattcaaacaattaaagccgaataacaaatatggaacatatccgaatttcaaaatatatatatatatatatatatataaattaaaacacatacaagtaacgaatacaatctcatgatacaactatacatgataacgattgaatatacaaattaatttttgtatttgaccctctcaaagaaaatactctatttttggtttatagctattatagcgtacaacatcgttgtagattaaaacttctaaacttctacatggttgttaaacgttagtatcaagcaagaggaacatgtacacattagtgtccaaagaacaaaaagaaagatgactacaaagaagctacaacaacaacaatgctaaagggaccagaggaccctatgggtgacattgaatacgaggaaaagactcaaagacaaaaaagcaatgacacaaggggatacatgaagccagtcaaaccattgacggtgttcatttaagtgtaaagagtctcgagggagtattgaattttgtgaaaaaattatagaataattgcacatagattcaaattattacatgtgagtataacaataaaacttaactagaaggttatctaagacaaaaactaattttgattaatttccatgagttatttcagacggacatatactatatagaaattattttgatagtgagattgttgtggggttaatagagtggagtcatattgtaattctagtttctttggttggtgataatggtggttgattgtcatgactaatcaccaccatcaatgacttctatgatcttattcttcaatcctaaatttcttcatcatagtatcttcaaattgatataattcagaagatcatagtaaaaaaaaacattaaaatatcattttccagcaattaatcatttnnnnnnnnnnnnnnnnnnnnnnnnnnnnnnnnnnnnnnnnnnnnnnnnnnnnnnnnnnnnnnnnnnnnnnnnnnnnnnnnnnnnnnnnnnnnnnnnnnnnnnnnnnnnnnnnnnnnnnnnnnnnnnnnnnnnnnnnnnnnnnnnnnnnnnnnnnnnnnnnnnnnnnnnnnnnnnnnnnnnnnnnnnnnnnnnnnnnnnnnnnnnnnnnnnnnnnnnnnnnnnnnnnnnnnnnnnnnnnnnnnnnnnnnnaaaaaaaaaaaaataaatgctatggacagcaaggaatcaatagatggaaaaaagaaagaagataatggaaattgtacttttggccgacatgatagctagagaatcgaaacaagtattgttttgtttttctttggtatccaataaacttgcttcacattttggttggtacaggcagaaaaaagagagagaaaaggaaaccgaagatgaagtgtatgttagaatattttcttttatttccttgttccctacagtttaacaactccgattgactgattggttgatccataacagcctcgaagatcattaatcactaactctaaaattattcttcccgtgtgacctagaaaaagtgacataataagtgaagttgaagtatctaattctttatttattggtaagatgcatgcaaaaaataataacgcactgtgaataccacatcttcctcttctattagtaattgaaactacataaatacaacctcattttttgaagctccactttgagtatgaatcctggaaatgttgacgaggaattgcccttcgattcatcagcagatgcagacaatctggctgagtacacgttggaaggaaaatgggaaacggttatagacatgttttttattttattagtaaagaaaatcgaatttatatataatctttttcctcaatcattgaatcctccttgtatctccaggttatccgcttgtacaatgaacacccagagtgtcacaccacaatgatcaacgagtccgcgggcactgcgctgcacgtggccatagatttgaacgaagaaggtgtggttgaagagcttgtgaatgcaattatcaatcacaggcagggtgagcgaagcgagaagatcaacgctctggtaattggggacgaccacggagatacccctctgcacgtagccgcgtccaggggattcgcaaaaatatgtaagttgatcattggaaccgacaatgaaaggatgtatttggcgagtcgaaaaaacaaacatggggagacgcctctgtttcaagctgctatcaactggaagaaacaggcatttgcttatctctctaacatttccaacaacagcgctcccgtgcaagatcttgagcgccacaatggagacactattcttcactgtgctattaggagagaatatttcggtatgttatacttgtatctatcttcctttgctgctaaacattcatattttctgctttatgtgccacggagaaaattactaatattcacatcacaatattgatggttccgagcatgtcttgttggacgtttatatcagtaaaccgcccatgatgttaaaaatacttgctttaattttcataaattttaagatttggacgtgattttgcaagaaaacgagtggatcatatatgcaatccaaacacctataataatttcttccgcaattcaaaattcttccacgataagtattatagttataatgtaagaattaaatatgatgcatgaacactatcatactaattaattgagaccaaaagagaaaaatgagaataaaatgtaagtatgataaatgatctgatgtgaagtgatctgacaagatataaaaagaagtattgcattaatgtatatgataaatagttatttttattgagttaattattgttgatctaatggtggagggttcaggtacatggaggatttaggtaatttgcatgaattcttggtcaatgcacttataaggaaagaagagaaaaattgttgaaaatatcaaataatgagaggggagagaatgagaaaatcactttagaaattatagtttttaatttatagtagattcattgatgtgtactaaaatcataattcaaattaatttacgtgcactaaaattagagacaaaatgactatatattcatataatttatcaaataagaattaaatttgacttttttttaaaaaaaaatccaagttcgaatgattgagatttattaaggatcatttttttatttttttatttttagtaaattttaaataaattatagtttaatttaaattcagcaccagcatactaattttttaaaactttattttatatttttaattttttaattttgaaataacagtacgctatactgattactatattgttatatatggtgcagatttggctgtgataatagtgcactattatgattttcttagcacacataaaaataaagagggattaactcctctcacagtccttgccactaggccgtcagccttcagaagtgcaagcaaactttcatggtggaaacaaatcctgtaccactgtaagtaatataaactgcacacatcactagctagagtaaacttgtaatataaactgtaaactcaaaacaactactttcacacatgcatgagtgttatttgtaatgttttctttaaataactttaatagaaaaattgtaattaatgaacattgtatttcaattaatcatcaggtataaccaattttaaaatatataaattacttttgcacagtaagtgtatacagaaaaaatgtaaaaccaggaaaaaagatatgatgagaagagagaggggtgtgaaattagatgaatggtgtaatggagagataaagaaaaaatattgtaagttttttttttttatgaatggaaatattgtaagaagtatcgcaaaaacttatattacatgaattatctaatttttttaaatgtgcacatttatgaatcataaatacgtacagagaatgtatgtaagagttttatctacctaaaaaatatatttcaattgattaatcataatgcgttaattattgtaaatcttgaatagtacttatgttttattcttgtagataattttttttatctactatataattttcttcttttgtcataggtatacttgtagcaccactggagcctgaaagtcaaatgaaggagaacttgagaaagatggaggatcctaagtctgataaaatgaattatccaaagaactacgccacattatatgatttctttgctggatcgttgagtgttgctgctctaattggtatgtaaaggggttctcatgcatgcttcccgtcttttttttttctttcttcttttatctcatcactttaatgttttctttactaatacttaatatttactgaaacatattttattatatgtgttcatagacattggttcatttcagcaaaagggataacaatttaacttgatcataaagaaggaagcttatgatcagtgtgtttcataagacaaataagttagtttctaatttattagaatagcttaaaaacttattttactcaaattatagagttgcatgataaaataacttatttcattataatgtttttgtaaaaactagttggaacatttagatttttttcttcttctcatttttgttttttgttttaggggtactagtttctcaaaagtctatctatttcttaagcatttttcttttggtcaggaaagatgccttcaaaaaataatcagcatgacgcagaaaacccgtcaaccaacaagtgtacatttggatttggaactggtcaggttggatctttaccaccaaattatcaaacctttcaacaatttgtcaggtctgcatatgtacatactcttggtctttcaggagcgggtatgtatattctgaatgttaattttttgatccattgctagcttactagctagttaaatattggtcttgggcaagatggtttaataattaacacacgtacgattgtttttgtttcattgcacttgctttttaagaattaaaggacataaagaagacaaaaaagaggcatcaatggagtggtcaactcttgaaggcactactgaaaaggccttatgcagcattcacaggaagcgggggaaaaccaactgatatggaagttgcaccagatatgtataatatttatagccaatataaacaaggtatgtatgaatgtatataacacggagaatgtataacctcaaaattaagaggattaacagttctttcacatttgagttagtgttttatataacctttaatggtttttacaacatttacctgtgcttgtttgacttggcattggtaggtgaacccactgaattggggtggttggaagaagaaaagaaaactgaggctgatgacaaaaaaaatttaagtctaagtgagacaattagtaaggaaactgatcaacttgctgacgagaaaaacattgataaaaaggagacagcatttttggttgcagcaagaaatggcatagttgaaatggtgaatgaaattttagatcgaattccaagtgtcatccacagcactaattcaaagaaagaaaatgtgttgctcgtggcagtgaagaacaggcaacccctagttgttgagagtttgaaaatgaaatcaaaacctgaagtttggaataacttagttctggcagtagatgatgatgagagcaccatgttgcatttggcagcatatgctccaggcggggataaacgttggcagatagctggttctgcattgcaaatgatgtgggatataaaatggtttcaggtatacccaaaacactttttttgtttaatatataatataatgttatatactgtagactcacaatattcagaagaaaaaaatgaagaatgtaagccttattttatagagtattgggttagggaagagaaagagtaagaaaaagaaagtgatagatgggtaaaaaacgaagaaagaaatggatataaaattaggtatatagaaatgagagggaagaaactatagaaagagtaaatttatgaaatataattaaagaggaatgttaacaatatatttctcaaaacattcatttaattattaattgaaatttgttaaaaaatacaaaattataaaataaaaaatcattaaataaaataaaagacttatattttttgtaatctataaaataatgcattattagcatttttcatataattacaagagtaataatacttacatgtatcaatatctgttatttagttttatctcttttattatcacatcaaatacttattacatctatatttttataattattttttctttgcaaaacattttcctaattataatatttatactaatgctgatgcttttgtttgactttggtgcagtatattaaaagccttgtgccacaacacttttactttagaagcgacaaggaggccaaaacagctggggaaatctttgaggactcacataaagacctcataaaggaaagtggtgactggttgaaggatacatctgaatcttgttctgtggtggctgcacttgttgctggcgtttcctttgctacagccagcagcgtccctggtggaaccaacgacgaaggtaagcctaatttagaaggcaagcctgcattcgatgtatttgccattggttcactcgttggactttgcttctcagtcactggactcataatgttccttactatactcacttctcgaaagcaagccaaagattttcgcagagatttgccactcaagcttcttcttggtttgagttcgcttttcgtatccattgctgcaatgtttgtctctttctgcaccggccatttttttctgattagtcacagatacaagatggtcctataccccatttatggagccacttgttttcctgtgactttttatgctgtggctcagtttccgctatactttgatcttctaacggccattttaactaaggtgcctcgggcaagtgataaaggggacaagttataggagcttctaccatatcattgactcagtgtggttttggattcatgtaattgttatacaaatcttttttggtttgttccttttctttttgagtcacgtttttgtttgtgtggtgtgcatttatttaataatatagctatggaaattaaaaagcttttaaattgtagcaaggctgtgttggttgtgctataaagtttgcgattgaggagaaaagtttctgcactcttttagggtaatgccttagataattttgatttcaactttaaagataatgttatatacttatactaattacacttattacgaaagttaattaatttaattattagtattaaatttatttataattataataattttttaaatttatttttatataatctattcatcttttttaatctttataggagaggaaaataaaaaatttaaaatattttagttaaaaaaattatttatacaaaagagaaataaaataaaatcttataataaagaataaaaaaattgttgaataacagacattattgtatacttaacttttgagtggcatacacattttctttttatagttaggttggtctgcagcagcaaaattaaagtacataagaaattattgtttaaccaaaaatttctttaattgtgtaccattacttacaccaattcggcaattctacaaacagttttcggtaacagtagccagctaattgcaacatcattttctttttattttcaaaaatgaaataaaaataaaacaaatattagaaatctactagaccaaaaaaacattttcactactttatataattaacagagataacaaaaaaatgtcattaatttactaacagagataacagataaagcgtcgagcttgccttcatggatataggctttctataacagatctcttttatctagagactcaaaattattagtataacattgtaggtttgtattatagacaattttgttattcagaaaattgatgtttatatattatcactggctatatcatactgtttataacaatttacacttttgtttgtgcttttaatttattttgaagcaagctgtagcaaagcctctgtacacaagttgatgattttaattattttaccttggaacagtatattaaaagccttgtcccacaatacttttactttagaaccaacatgaagggcaaaaccgcaggagaaatcttccaggatgcacatgaagaacttagactggatagcggtgactggctgaagtacacatctgagaattgctctgtcgtgacggcatttgttgcaagtgttttgtttgctacagccagcaacaatatccccggcggcaccgataataatggtaaccctaatttagaaggcagtcctgcattcgatgcatttgccattgcttcgcttgttggactttgcttctctatcattggactcgtaatgttccttgttactcaaacttcttcttgccttaagttctcttttcgtttccattgttgcaatgcttgttgctttctgcattggcaattatttcctgtttagtaatttcgaacacaagatgatcatcttccctgtttatttcagccacttgtttttgtgtcactttgtacgtcgtatcacagttgccgctcgatctacgttgctcttcaagcagtcaattttgttaagatgccactggttctggtgaagaagacagtttataggaataggaggagcttctaccatatcatttttagagctgtattatattgtacttaattcagagtctggtattatcatatcatcatcttcagcaaatattttttatttgatttgtcacttttccatttcttgtcacgtttgtctttaagcagagattgtggtgtgcatttatatatatatgtatatatatatatatatatatatatatattataaacaacttttggattgtagcaactttgtgtgttggttgttgtggaatttaatgtttgcgattaaggatagaagtttctgcacattcttgtcacgtttgtgtttaactaagcagtgttggtttgtgtccaaatatattattcttaatttaaagttgacactcatagctaccgactcagtccgattcagagtcagcaatttttagcggtttaaagtcgaatcacatgagtttttacgggtatatttgcacttttgatctgaatagctgaccgacctggtcactaatcttggtttaaccgatcgaatcggtcagttcgatcgatctgtgttctaaaactatgattttatacttaatttttgtgtcacattcacatttccattgtaagagctgatcctatgagacttttggtgccttggacgatctaattaaaaaattatgttttcataattatttgaatattatttgtatttttttcttgcaaaattattaataatatcttcataatcaagattcttttaaaaaaatcattttggtagaaatcaaaagcaaaattatttaagcaaatagaattttaacaactttaatttcaataaaattatttcaacaaatacaacattaataagaataataatattattatataacttgtacatgcattaaaaaaataattaaatatctttaaaaacctaatatcataaaacttgacttcgattcaattatattgttaaaatttctccatgcatttcctataatgctcttttgaaccgtctttctatgagtataaaatcatctttgaacagcgcttttatagtagtgaacctttccatcatatctaaaaaaggtcaaggggtattccattattcaccaactacaattcggatatatagcaacataacaaatatagttcaaatgaacaacatgaagaaatttttgggatgtacacctgcaaatgaacacacacacacacacacatatatatatatatatatatatatatatttcagtataatataacaaagctcacacacacatatatatatatatatatatatatatatatatatatatttcagtataatataacaaagctcacacatatatatacatatatttcagtattatataacaaagttttgtgagcttgtttgtggggtacctcaaaatatccccagttctggcaagcatcttcaatctggtccagtgtggctttcctctcctcacctttgagattctccaagttgatcacggggaagttgtccatctctcgcactttttatttattttgttcttatgagaattcgtaatgtgtttgttgatgcatattgagatgctaggtgtctcatttatcaacattaagaacacctttaatttaagttaattaggatcgatcataaatgaattcaataatagatacaaaatgattaaaacaataaaaaaggaaaataagaaaaagaaaagataaaagaaaagaaggaaaaaagaaagagatgagagataaagagaaaaatcattaaaaatagatcttttgaaatataaagataacaaatggtctaaccttctattaagtttataacttttttttattttatcttaaaatttattgtccgtcaatctatatctcactctattaaatcttgtttaactatctttctcccaatagctttctgtctacttttttgtgtcatttatatatagaaatgaaaaaagagttaagtgatcacaacattgacaaattaaaaattctcccgtgtgccttatgaatcatgagatgcatgccacatgatcattttgcatcgttgaattgtctacttttggtatcgttggactcatctatggaggcgaaacaacaacttccttgcattttcccttaaattgatactatggtgtttcagcacgtggtttcttcagtaggtggcattacctagcaaatgaagttctaaaagttattattatatatattatatgtaagctggtgaacgatttattcgatatctaacaaatacttaagtaaaatagatctgccatggtattattgtatttgatacccacaaaatttacctccatctaaaattgattactatagcctacaactacaacttacaagcatgagaaagatttcatattgttttgggctgaggttctaccatgtaggggtgtttatcaatcgatccaaaccgatgcaaatcgcggtgaccgaaccgaaaaattgataaccgaaaatcgaaaaaaaaaaacaaaaattttcattggattggatcggttttcggatcggcgggtgaaaaccgattcaatccaaaccgatccaattataaccttaccttaccctttacctacttgggcctatttcctatcatagtccaaaaaccaaaaatccaatacattgctccttattttgtctaatgaacgtgtttgtccaatgaaaattagaaaatgatgtttgtttttgttcaatgaatgtgtttgtttatgctagatactccttattttgataaaaataattctaataagttttatttttagactttttaaaaaaccgaaaactgatccaatccaaaccgaaaaaaattggattggattggatcggatttgaaaaaaatttcaaaccgaatggatggtcaaatgaccaaaccgaaaggattgaatcggatgattttttgctttaaaatcgatccaatccagaccgcaaacacccctactaccatgtaattgtctttcattaattttgcatagcgtgttcgattttttatttcaatgtgatttttcgaatttatgaagaattttatcgttatagtttctaaaacgttttcttaatttctaaggtgtttcccaaacacacatgccattaattgaataagtaagacaatccagaaaataattagaaccaatagcttacaagttattacaagcacgaaaaaaaattaattgaaaattatatctggacaatttcttttttcaaaaaataaccattgatacaaatttaaaaagaattaagaaatatcattatctgaactagttgcctttttctattcctagctttgaccactagagcaataggagccacnnnnnnnnnnnnnnnnnnnnnnnnnnnnnnnnnnnnnnnnnnnnnnnnnnnnnnnnnnnnnnnnnnnnnnnnnnnnnnnnnnnnnnnnnnnnnnnnnnnnnnnnnnnnnnnnnnnnnnnnnnnnnnnnnnnnnnnnnnnnnnnnnnnnnnnnnnnnnnnnnnnnnnnnnnnnnnnnnnnnnnnnnnnnnnnnnnnnnnnnnnnnnnnnnnnnnnnnnnnnnnnnnnnnnnnnnnnnnnnnnnnnnnnnnnnnnnnnnnnnnnnnnnnnnnnnnnnnnnnnnnnnnnnnnnnnnnnnnnnnnnnnnnnnnnnnnnnnnnnnnnnnnnnnnnnnnnnnnnnnnnnnnnnnnnnnnnnnnnnnnnnnnnnnnnnnnnnnnnnnnnnnnnnnnnnnnnnnnnnnnnnnnnnnnnnnnnnnnnnnnnnnnnnnnnnnnnnnnnnnnnnnnnnnnnnnnnnnnnnnnnnnnnnnnnnnnnnnnnnnnnnnnnnnnnnnnnnnnnnnnnnnnnnnnnnnnnnnnnnnnnnnnnnnnnnnnnnnnnnnnnnnnnnnnnnnnnnnnnnnnnnnnnnnnnnnnnnnnnnnnnnnnnnnnnnnnnnnnnnnnnnnnnnnnnnnnnnnnnnnnnnnnnaaaaaaaaaaaaaaaaaactgtggcgtctaactgataggacatttctgttctacaattccaagtttttgagaccaatgggaagacgttggttttggtcagaatatatcttggccatcgcggtcagttgatcatctttatcatgttttttgttcttagcaacaaaaaaaaaatgaattagtccagcatttaaattgagtattgtcaaaaaaactatggaacaccggaggctgccacggtatgcgtaccttgtacgttattaattgttgagactgtggaaatcataatttttaaaattgaattagatcgtctctcgactagtctgatcgaaaacctgtttacgtgattgatcttttaactttttttttaaaaaaatttggaagattttaaaactggtaagaatcattcaaaaatcgattaaaccggactaaatatagtgaaaaaaaaagggtcaagaatcgatacagatagataattgatttgaaccagcattttcatttttttattaatttttttaaattaaaaatatttaaagataaacaaaaatacaatttaataaaaatcaaaaataggtgcaaattaatttatcaattattattaatttcttcttataaaacatataatttacttatttatatgaatttataatttttatatcttaatttcctaagattttatattgtattaatttgtcattttattatttattttagatgtaagtttattattattaactgacattttgtattttactaaaatttaaacttaagtaatactatttgtttgttttatttatactttgaatgttataaatctataaaatttatttaagctttaattttttttttagtctatgtaatttggtcattttggttttttagtcctagaaaattatttcagtcattttaatccctaattttttttgtatttttaattcctatcattaacgtcagtcccttaaaatactacatggcaaagagtgtaaaattatcatgtcatgtgttgttcacatggctctatttctgtgatctcttttgttgacgacattttttccaacacaaatttctaacatgtcactgagaccaacaacaattcttttattcagtcattatatgacttcaattgaggcctaaatcagttcgtattatggtagcttttgctcaaaagtttaattttgaaattcctaacaaaaactccaagcacatgaacatgattagcctaatccaactcaatctaacaaaacaaactctgcagcgggctaactccagattgagaatcatcaaggagtaggaaaacctgaagcatctctgcatatgaagtatggaacaaaaattttagctcttttctctgctttatatctttttcccactttagctcagttacagagatcataacaaggcgcaaaaaagagaaaggaattccacagctacgaatgcaacattccaaaaaaggaaaagaaaactgaaggtgtgttgcacgacatccatgataactgaagtgtgttgcacgacatgcatggcaacattccaaaaaggggaaatataacatgcacgacatacaagaaaaaagataattgaatgaaacaagcaaagtaattacgtttgatttttctttgctggtaattagctacagtttcattggtctcattcatagcagtctcgatcaacgaagatgaatactactaactaaaattattcttcccgtgtgacccgcgaatatttcggtatcttatacttgtgcggggccggatatgttatggcccttgtgggaaacaataaacaaggatctcccatatatttaagtattataaaatataaatataaatttcataaaaaaataagtacatatttttattaaaaattgtatgatttattgcatttaactagtgattaacaaagttttaataaattttaaaaatatgaattatcttttttcttcaactaattcttatatacacctagaaataatcaaagtttgacatttactactaaaaaatatacttttaatatcattttttaacatcgattttataaaatctgatgtaaaaaaaaaggacagtgacataattgtaaataggttgattttgttaatatcaatttttaaaaaaattaatgttgtacatcgatattaacatatggtagcaaagtataatggtgaacatatggtagcaaagtataatggtgaaattgtacaggaacatgggcaaaagataggagatgatttacatgtatattgttcatgctttaactaaacttatgttataccaacgaaatgttctatcaggaagagacatgcctatttgatttattttttaaaagcttattggaaattgcatagagcgtcttaagctaatttagatggatgtttttttaattttcacccccatcttccaaaaggaggtacttttgttcaaggaccaactattctagaagcaggcacaggtctaacagtggttttatagttaatacacccttcactgaatagaacttttgattgaagtgtacaacttgatagcacatcaaagattggagggtcacaagtcatgaaaagattttctttgaacttatattgttttgtgatatcattctcgtatatttgatgcatacaaacatggtaggaggtttgaaacttagttgaatttttatccttcatttatttataaataaatactttccaaatctataagtttaacttagagaggaaagattatgaacttttttcaacatgtttgtttaagctatcttgcagaagcacctgtagcatgcatgcaaggagaaagttcaagttcttttaggggtatatgctttctattgaatgaaggtgaagatgaacaaaggtagatggttattgctaaaacattcttttgtgtgtgtgtgtgtggtggggggtggtattttggagtatgagtagcttttgcttaatttacttctatattacaggcccttctatatacactgtttgctttctactacctatgttgtctcaaattactatggagactgaagaatgcaaagctttggcttcatgtgtaaaggacttgaggccgtaagttatttctggttccaatgcttatattttttattttatattcttcatttctcctccctttttttcctgctaatttcttttaaaggtggatccgtacgtgtaaatcaacaagattctaatgattggtgtatagtttaatttaatattctagcattcttttacatttgttgcaatggcatcattcaataacattattaacaaagcaggttttttgtttggctaaataaattggatatatttgtagattttagattaatgcttcagtaaattagttgggtcacatgcttttctggttgaggataatgcttgcatctttatggtgtgtgatacaataatgaatcttttattaaaggtgagtttcttatcataaatcagccttattattctatattggttttggttgtgcaaaatcttattgacataagttgcactttttttattctagaaagacaaagttcaaataatgttggatgtatcagctattgttgatcttcttaaagcgttggctcattggtcaggtaccatacttgttagcagccattaaaattagtgtttttattgtgctccattatgtgatcatattcctttctttttcatctacttgtttgcttatgcatgtttaaaaaatgacacgtgctcttgtgcagctgtattagcatgtatatatataaaaacaaaatggtttctatgtcacgttgaactccctttgtaccttagtttataataatgagcttaattttaattcataaacatcttttacattattattatctgattacttgttgttacaacattaaattactaggtatttacattatattgttaatgataatattaatattattatcattattaaattttttgcaaaaagcaacattgatttaaaaccgacgtagaaagtatttttttcgcagagatttgccgctcaaacttttcttggcttaagttctcttttcgtacccattgttgcgttgcttgtttctttctgcaccagccattcttttctgttcactcacaaatacaagacggtcatattccccatttatgtagccacttgttttcctctcactttctatgcggtagcacagtggctctctactttgatcttctaacagccattttatataaggttccaaaggcaaatagtgaaggagacagtttataggaggagttttacccatgtcattgttagagctatattgttcttaattctgtgtggtgttggattcatgtcattatcatatcatgcgagtatttgatttctcgctttcccatttcatgtcacgtttgtgttttaagcagagagcgtggtgtgcatttgtgtaataaacacatattatgagcaacgaaacagcttttgaattgtagaaactgtgttggttgttgtattgtgtaatgtttaatttgcagttaaggggaaaagtttctggacattcttagtgtaatacctctaataatcttgatttcaactttaaagttattgttgtgatttatactgaacttttgtgtcacatttacgtatcatgattatacgggttcgactaacaaagtccagtacaattggtaaataattgggttcacatgttgtaaaggattcgattcctcatcatggaaacaaagaaaactttgtctggcgagacaaaccctactttgacaatctttatatgtcaaaagaaattagtcttgaaggacatcttgttgcaaataaaaaaagaaaagtaaattatatgggtcggtttgcagcagcaagaataaagtttctggtttaagctcaaaccgtaatccatgagttaaaccattgctacaatgtacaaacagtctttgatcgtagcaggcaatttggaaccttagttcttattctcaaaaataatggagtaaataaaagatctagaaatcgactagacccaacaaacgagacaagggaaaaataattcgtaattgcttctaatcagaataattcattatttattaaaacggaagtaatcaaatcacctgttgtaataagaaattgaataattagaatacaaataatggtttccccattgctgttttttttttcttcaaattgccaaatcaataaaatttttctggcagtatattatataggtatagctcctgttaaggtgtgatggagttggaaatactctaaaatgagttcactcccttcatggcttcgaatctgggctccttaggctggaacttgagtgtagcatagagcttcatgtaatcctcaaatacaaattttgggtacacttgttccgtctcttctgcctttgtctctaacaatgctggtgcagggtagataagagcatcactggcagggttgtagaatgaggctaccgacattctggtcccatcagttttagcaatcacacgatgctccacactcttgtatctcccattggtaatgacctatgatattagaccaaaatgttgaaagaaaattactataagtacagtgttatgctttagggacataaccattattgaaagaaaaaggtacatacctcaatttggtcaccaaggttaacaacaatggaatggcgcattggaggcacatccacccattggccatttttgagaagctgaaggccactgaccttgtcatcttgcaagagaaggataatcccacccgcatccgtatgtgcacgaagacccttcaccaactctggctttgggcattcagggtaatttgctacctttgtcccaaaatttggacctcttgatccataaaatgcattcttcaagtaccctttctctaatccaagattttcacaaaacaggtctagcaactcctctgctagtttctctaatttctgtgcaaattccttcattgcatccctgcatcattaactcatctagtttagactatgtcatacgtagacaatgctatgtatcaatcatgttatcatatagttttcgatttgtcataccggtagtcttggctgagatcagggatttctgagatgttggaggttgggagatggcgcaagaagaaggtgctctcccaatccatgtcctttacttcagcttctaacccgttgcttgacactgcctcctggaacctcttctccatgcatttcctataatgctcttttgttaaactttccacagtatccaaaagttcaaggggtattccatgattcaccaactacaatcaggaaagcagcccaattaacatatataatttaaatgaacaagattacgaaaacttaatgtttcaaatgtatagatataaatttgagttatgagtatgacagagcttttgtcagcaagtttgtggttgtggggtacctcaaaaaatccccagttctggcaagcatcttcaatctggtgcagggtagctttcctctcctcgccattgatattctccaagttgatcacagggaagttctccatctctcaagctttttctttcctttgttctttatgagaattcttgatgtgtttgttgatgcattttaggatgctaggtgtgtgcaatttataggaatgcaaagagttcagtgaagacaacatgacaaattaaaaattctcctgtgtacctcatgaatcatgagatgcatgcttgcttacgtagttgaattgtctactttggtatcgctggactcatctcatggaggcgaacccaaccttccttgcattttcccttaaattgtagtactatggcatttcagcacgtttaggatattgttaactaatattcttaagatattaattaagaaattaaaagagaaaaataattattacataaatagtaagagaagataaaaaaataatgaataatataatttttttgtttttcaataaaaatatttatattttaaatttcttaattaatatccttactcactgctaggatttatcttttatttattatgaaagcttgtgaactccttattctggcatgtataaaattattaagtgacaatagatctgccttgctgttattgttctaaaattgactagaacctatagcttataattttcaagcataagcaaaatttcatattgttttgggctgtggttctaagatgtaattgaatttcaacggtttctatagcgtaagttattggatttatagtttagatgtagtatttcatgtttttttttttttatannnnnnnnnnnnnnnnnnnnnnnnnnnnnnnnnnnnnnnnnnnnnnnnnnnnnnnnnnnnnnnnnnnnnnnnnnnnnnnnnnnnnnnnnnnnnnnnnnnnnnnnnnnnnnnnnnnnnnnnnnnnnnnnnnnnnnnnnnnnnnnnnnnnnnnnnnnnnnnnnnnnnnnnnnnnnnnnnnnnnnnnnnnnnnnnnnnnnnnnnnnnnnnnnnnnnnnnnnnnnnnnnnnnnnnnnnnnnnnnnnnnnnnnnnnnnnnnnnnnnnnnnnnnnnnnnnnnnnnnnnnnnnnnnnnnnnnnnnnnnnnnnnnnnnnnnnnnnnnnnnnnnnnnnnnnnnnnnnnnnnnnnnnnnnnnnnnnnnnnnnnnnnnnnnnnnnnnnnnnnnnnnnnnnnnnnnnnnnnnnnnnnnnnnnnnnnnnnnnnnnnnnnnnnnnnnnnnnnnnnnnnnnnnnnnnnnnnnnnnnnnnagtctttcatgtttattaagaagcttgtaattattgacttattgcattctatatttcaaaattcaaacataatttcttacttcccaacatgttttcaaacacatgtttagtaattagacgccattaattgaaaattataactggacaatgtcttttttaaaataatgattgatacaaatttaataaaaaggaaacaagatatatcactatctgtctgtactagttgtgtttttcctttcctttcctttaaccactgtgccaataggagccaccaaacaaagataagctgtggcgtctaactgataggacatttctgttctccatttttcaagttagtttttaagacaaaaaatgggaagacgttgattttggtcagcagaaatatatactatattcctattcctactcatcggcgtctctttggtcttcatcatcatacttttttcttggcacaaaaaatttgaaccaaatctcttacgacatgttaggataacaaaataataaataaaatgatttttagtaagataaaattaacttaatataaattaatgtgtagaaaagttgagagatcagcttctataaattaatttaaacatgaaagatcagtttgtagaaaagtttttctttttcttttaaaagtatttttgaataaacttatcaaacaaactgaactttgtcataagttcaacatgtaaattgaatattgtcttttaaccatgggcaactagaggctgcaatgtgcatgcgtactttgcacgttattattgtgatgtgtgtgaaaataaccaagtgataatgaaataacataagatgctaaaaaaaagaaagtcaaagaaaaacgtgcttaataatacattttatttatttattttcatgatttcgtaaatttttcgtctcctatttttaaaattctggaaattttattactatattagttgaatgttcattatcgttaattgactaataatgtgatggtatttattattgactttatattttgatattaacatgataatacacattacactaatacggatcattgaatggcattattgtgccgatctacatgcagtaaggaaaaaatgtacagaattttaaacacagaaagataaaatatgtgaaaatattcaaaattaagaaattaaatctgtgaaaattataaatggttaaaataataaatgttaaaaatagaattagaatccacagtcttttccaattccactatcacttcaggtactaagtcacttgaccttttttagttctaaataaaaattattttatggatactatcgccgtatttgttaattgcagatttggtccctcaaagtaataactattgtgagaatttaattttgctaatattaaaattttattattttaattaaaaatataatttcgtaaaaaataaattacttataaaaataatttataataatatatccttataaaaaaattaaaattgcaatgatgtcccacttaaaaataaaacacttttttttaaagcgcaaaccctatatttattgtatgaaaaaaaactaaaagttaagacaacaaatttattttaaaaaatatttttattttaattaaacaaatttataatttatacaatttcatttattaagttttataattataaaacttatataattaaataaattataacaatcaatgctcaaacaaattaaactatggagtaaactgttgaaattaactcctcttcgtgtgtcttctcccaaagctcgagagttttggcaacatgctggcctctagagctctatagaagctgtaataaactcctcggatatggtttccagcatcttatgttcgaccttctccatactcttccccagcaaaaaaacaaaaacattctactttgaataataaaagataatggtgtattttatatattaaaatatttttatattatttttttatagtttattaaataagtttatacaactattttttacaataatacttttcatatattctataaataaaggccatttgattgtgctaaaaaatatttatttaataaaaaataagtggtttatttttaagagggacgcgtattttaatttcaattttttttataagaacatattatttaaatattttttatgattgattttttaacagttatattattttaattttaaattaaataataaaaattatattagataaaaaataaattccccaatggttatactttggagacgagtagaatagatactaacatttttatttatgaattaaatcaaacatgtcaaatatattaatttacttgactttgataatattatctgtctcatgataattattattttaagttattttatacagataaaaaataattaataaagaaaagagaataataattttataaaattaatcatatatcatcattaatttatttataatttttattatccaccgttgatataataacaaatataagtaaataataataatattacattaataaaaagttaaaatggtaattattttaaaatatttttttctacaataattataataaaacgggaaagtaatagaatatgaagattaatctcacctctaacaattttattatttattaatttttgtacagtttgcctcttcaatttcaaaaatttgtgcaatttgcctctattcattattattatttatttattttgttgaactgaaagggcatagccccaggaaataaacgaagacacaaaataaaaaacttgtaccatacctcgtggctgtaacccgaaattggctagactatcagcatttcattgtcatgccagtgctatataaaactatcgcgtcaggagtcaatgttaaattactgtgacgaattttgcaaaattgttaaagtaacgaggaaaaatgtgtaattaaactaaaaaattatatcaaccagaaatccagaatagcgtcatgttctagttatacagtggcatattaatcattgaaataaaacgaattgaacgattttattaaagacgaaatctaattttgacaagaactgtctagagaagccttaatatttaatttccttacaaaaaaaaaatggaaatatgctagatttagacccaaagaagatagtagagaaagaacagcagaaaaaaatgcatattatttgaataattttggctatttcctttaccaaaatacaagtaatcaaatcacccgctgtaacaagaaattgcatattaaataaacaagcttaattgctatttctttcaaattttatcagttaataaattttcttcatgcaattgcaattggaagtaatctaaaatgagcgaatggccttcatggcttggaatctgggctcctttggctggaactttagcgtagcatagagcttcatgtaatcctcaaatacaaattttgggtacacttgctctttctcttctgcctttgtctccaagaatgacggtgcagggtagataacagcatcactggcagggttgtagaatgaggctacggacattctggtcccatcagttttagcaatcacacgatgctccacactcttgtatttcccgttggtgattacctatgaatatgatattagaccaaaatgtcgaatgagaattactataacagtataactacaagggctatgctttagggacacaacaattattgaaagtaaaaaggtacatacctcaatttggtcaccaagattaacaacaatggaatggcgcattggaggcacatccacccattggccatttttgagaagctgaaggccactgaccttgtcatcttgcaagagaaggataatcccacccgcatccgtatgagcacgaagacccttcaccaactctggctttgggcatgcagggtagtttgctacctttgtcccaaaatttggaccctttgatccataaaatgcatttttcaagtaccctttctctaatccaagattttcacataacaggtctagcaactcctccgctagtttctccaatttctgtgcaaattccttcattgcatccctgcatcattaactcatagttcagaccatgtcatgtgtagatatgcatcacattatcaaatttgtcacacaaatcacacagttaattaatgcagcattgttttgtcattgttggagtattgataatgaaaacataattatataatatatatgccaatatgccatcaacaatatttcgttatatgccatcagcattgttttcttagttttcaatttgtttttacctatactcttggctgagatcagggatttcggagatgttggaggttgggagatggcgcaagaagaacgtgctttcccaatccatgtccttcacttcagcttctaaccctttgcttgacactgcctccttgaacctcttctccatgcatttcctataatgctcttttgttaacctttccacagtatccaatagttcaaggggtattccatgattcaccaactacaattcgggatatatagcaacataattaatatagttcaaatgaacaacatgaaatttttttgggatgtacacttgcaaatgaactgatatatatatatatatatatatatatatatatatatatatatatcaatataatataacaaagctttttgatcaggttcgtggggtacctcaaaaaatccccagttctggcaagcatctccaatctggttaagggtagccttcctctcctcaccgttgagattctccaagttgatcaccggaaagttctccatccctcactttttttctttcttttttgtcttctgagaaatgttaatgtgttttgttgatacatattgggatgctagctaggtgtgtaccatttataggaatgcaaaagagtgtgcagtgaggacaagtgaaattctcccgtgtgattcatgaatcatgagcaaatgaagccaatctatgccacgagatcattttgcatcgttgaatctggtaccgtttgacttggaggcgaaaccaaccttctttgcatcttcccttaaattgtactaaggcatttaagcatgtggtttcttagaaggtggcataagcaaatgaagttctaaggttttaacagcatttatgttattgttattaattattaatgaacgatttaaaaaactgtgtgaactgcttattcgaacgtctaaagtacttgtgtaacaatagatttgccatccgattattgtatgttgtacactcaaaatctacctccatctaaaattgattacaacatagcctacaagactttttaactaaggtagtttttgaaaactatttattcaaatagtacgagaacaattaataggaattgtcttctgtttttgtcttgtagaggaaaaaattagcctgagtgatgcctccaaagtgatagttattttcaactttttacatcaatcatacatacaatcaaatataaattaaaagtaaaaaataacttacaccgtcatagaataatagaggataaannnnnnnnnnnnnnnnnnnnnnnnnnnnnnnnnnnnnnnnnnnnnnnnnnnnnnnnnnnnnnnnnnnnnnnnnnnnnnnnnnnnnnnnnnnnnnnnnnnnnnnnnnnnnnnnnnnnnnnnnnnnnnnnnnnnnnnnnnnnnnnnnnnnnnnnnnnnnnnnnnnnnnnnnnnnnnnnnnnnnnnnnnnnnnnnnnnnnnnnnnnnnnnnnnnnnnnnnnnnnnnnnnnnnnnnnnnnnnnnnnnnnnnnnnnnnnnnnnnnnnnnnnnnnnnnnnnnnnnnnnnnnnnnnnnnnnnnnnnnnnnnnnnnnnnnnnnnnnnnnnnnnnnnnnnnnnnnnnnnnnnnnnnnnnnnnnnnnnnnnnnnnnnnnnnnnnnnnnnnnnnnnnnnnnnnnnnnnnnnnnnnnnnnnnnnnnnnnnnnnnnnnnnnnnnnnnnnnnnnnnnnnnnnnnnnnnnnnnnnnnnnnnnnnnnnnnnnnnnnnnnnnnnnnnnnnnnnnnnnnnnnnnnnnnnnnnnnnnnnnnnnnnnnnnnnnnnnnnnnnnnnnnnnnnnnnnnnnnnnnnnnnnnnnnnnnnnnnnnnnnnnnnnnnnnnnnnnnnnnnnnnnnnnnnnnnnnnnnnnnnnnnnnnnnnnnnnnnnnnnnnacaaatttaaaaggaaacaaagatatatcgctgtctaaactagttgtctttctctttttggatactttcaccacttaactaatactaataggagccaccaaaataaagataagctaaataagctattaagctgtggcgtctaactgataggacaattcttaaataagtttttaagaccccatctggaaaacttttagtcaaaatatatatcctgttcatcggggtctcttcagtcttcatctttatcatagttttttctcagcacaaaaaaattgaattaagacttagactcatcagtcttcaagtccaaatgtaaatcgaatattgtcttttaactctgggggaaatggaggctatcacgggtatacgtactttgtacgttatttttgtcacgtgtggaaataaaccataagaatgttagaaaaggaagtgagagagaaatatgtggaccaaaatagtagtctcagcctctcaggttcttgttacacagtgccatctaagtggcgctcgagtcagtttatttttttatttttaaagagaaattaagttaaatatatttgctgaaaaatcttaaaaattagtaacttaatttttattaaggaaagaaaaaatatttttaaaataatttttttctcttttttcttttattttttctctactttgttttagacatttctttcaaatcagaaagatgaaaattatctacaaattctactttaattttaaacttattatttagattcttaatttgaaattttaattaaaagaaaaatacactagacatgtcaggttcatgccattgctggtggctgctcttgacacttgtcaaagttagatttcttctttctttcaaatgggcatcatatagttaaatttggtaaaatctcaataaataaagttatacaaaaattgtaaatgtgtgagtctaaataaaattgttttataattttatggaataacatatttaaaacttaatatattgtatatctaaacatatgactaagaatgaatcatgataataaaaaatattttactcttaaagtagtaaaatattgattttttttttttactatttagggacatttttcagctcttatcactaatatgtaattaatatagaaaatcataattttcaagcnnnnnnnnnnnnnnnnnnnnnnnnnnnnnnnnnnnnnnnnnnnnnnnnnnnnnnnnnnnnnnnnnnnnnnnnnnnnnnnnnnnnnnnnnnnnnnnnnnnnnnnnnnnnnnnnnnnnnnnnnnnnnnnnnnnnnnnnnnnnnnnnnnnnnnnnnnnnnnnnnnnnnnnnnnnnnnnnnnnnnnnnnnnnnnnnnnnnnnnnnnnnnnnnnnnnnnnnnnnnnnnnnnnnnnnnnnnnnnnnnnnnnnnnnnnnnnnnnnnnnnnnnnnnnnnnnnnnnnnnnnnnnnnnnnnnnnnnnnnnnnnnnnnnnnnnnnnnnnnnnnnnnnnnnnnnnnnnnnnnnnnnnnnnnnnnnnnnnnnnnnnnnnnnnnnnnnnnnnnnnnnnnnnnnnnnnnnnnnnnnnnnnnnnnnnnnnnnnnnnnnnnnnnnnnnnnnnnnnnnnnnnnnnnnnnnnnnnnnnnnnnnnnnnnnnnnnnnnnnnnnnnnnnnnnnnnnnnnnnnnnnnnnnnnnnnnnnnnnnnnnnnnnnnnnnnnnnnnnnnnnnnnnnnnnnnnnnnnnnnnnnnnnnnnnnnnnnnnnnnnnnnnnnnnnnnnnnnnnnnnnnnnnnnnnnnnnnnnnnnnnnnnnnnnnnnnnnnnnnnnnnnnnnnnnnnnnnnnnnnnnnnnnnnnnnnnnnnnnnnnnnnnnnaatgatgaaaaattgatatttgtatctgattttatttcaatttcctttctctctaattttgtagaaattagaaataaacaacgggtagatgagtaaccttcaacttttttgtaaaatgtatagaatcaaaaacgaaaaaacttatttttttaatgaatttgttggttttatttttcattggagaagaatgtccgcaatactgaaaaacactttgatgttaaatggtgttttctaagatgttctgatcctcctccatgagacaaatggacatcatttaagtgattttgcaaatgaactgaaatcattcgtctcacattgtatcttatttcctgctcctccaattaaaactctccatctcaattaaaaccctccaatataataataatgtagatgtaattgattgccacttaagtttatgaaagtattaaaatttcaaaaaaccttatttgtttgtttgtaattttatttttatcattaaaagacttacattaaaatacatcatatactagtctatctaagtgacagttaacaatacacatatgaatgacacgggataattcagtctgtacgtaataattgatgacatatgcataaaagttcattcagagatcaaaataacaataatggaattctcacttgtcattcatgcataactaataatatatatataaatatatatatatatatatatatatatatatatataaactagtgatgaacaccccagaccattggcaacttgcagccttaatatttagtttccccaaaaaacgaaataataaaaattattggaaatacaagaggtcaagatacgagagaaagaacattaaaattgcatattatttgaataattctgttattttcctttatcaaaatacaagtaaatcaaatcaaccactgtaaacaacaaattgcatcaataaatcagcaacatttccaagcttaatttctattgcttaattcttttcatattttctcagttaataaaatttattcttgaaattgagcagtcgtaattggaagtaatctaaaatgagccaacagccttcatggcttcgaatctgggctccttaggctggaacttgagtgtagcatagagcttcatgtaatcctcaaatacaaattttgggtacacttgttccgtctcttctgcctttgtctctaacaatgctggtgcagggtagataagagcatcactggcagggttgtagaatgaggctaccgacattctggtcccatcagttttagcaatcacacgatgctccacactcttgtatctcccattggtaatgacctatgatattagaccaaaatgttgaaagaaaattactataagtacagtgttatgctttagggacataaccattattgaaagaaaaaggtacatacctcaatttggtcaccaaggttaacaacaatggaatggcgcattggaggcacatccacccattggccatttttgagaagctgaaggccactgaccttgtcatcttgcaagagaaggataatcccacccgcatccgtatgtgctcgaagacccttcaccaactctggctttgggcattcagggtagtttgctacctttgtcccaaaatttggacctcttgatccataaaatgcattcttcaagtaccctttctctaatccaagattttcacaaaacaggtctagcaactcctctgctagtttctctaatttctgtgcaaattccttcattgcatccctgcatcattaactcatctagtttagactatgtcatatgtagacaatgctatgtatcaatcatgttatcatatagttttcgatttgtcataccggtagtcttggctgagatcagggatttctgagatgttggaggttgggagatggcgcaagaagaaggtgctctcccaatccatgtcctttacttcagcttctaaccctttgcttgacactgcctccttgaacctcttctccatgcatttcatataatgctctttggttaacctttccacagtatccaaaagttcaaggggtattccatgattcaccaactacaatcaggaaagcagcacagttaattaacatatataatttaaatgaacaagattaagaaaacttgatgtttcaaatgtatagatataaatttgagtatgagtatgacaaagcttttgtcagcaagtttatggtggtggggtacctcaaaaaatccccagttctggcaagcatcttcaatttggtccaagatagccttccttttgtcaccattgatattctccaagttgatcacagggaagttctccatctctcaaggtttttctttctctttttccctcttagtaactatcttagtttgtttgtctgtgcagatcaggaaacaatgtgtgtgctatttatagaagttttaagtgtacagtacaattaataaatagtaagtattacaaatcgtgtttgactagttttaaggcatttgaagaatcatgaatggtcgtgatcatgaattttgcgtcattgaattgtcttctttgacgtggccattgaatcctttctccttgttagagtttcttcatgtggtttcacagaaggtggcaaacttcaccagctatgtagaggtgtaaaaactaccaaccactgaattgtaaattttcatagtttcggaaatgattggcctaatataagtttgaattttcttcttcacttgtctcctttacttcctattaaataagaaattatttggttagggctgacatcatttgttaaatattgaaaaaaaatatatattcgttaaaaaaaatcagtagattttggtataaaaaaacaaaaacatgtaccgttcacggtaaaaaaaaattcctacttaagatcagtagaatgaaaaaccttttataagttgatccacccattaagtagattaaaataattattgtatttaacactttttatttttcaaatgacgcaatcaatcattgtttattttactgtaataattttttaaaaaattcattgtttaattggtattacacatttgcactgttatttcacgttttttaattcaacttaatattaattactccttttgtccctatttataagacataattaaatatatattttttttgttttttattataaaattttatttcatttctcttgtgcattaattattttttattattaaaataccttaaaatatctccttctttcttttatggaaatttaagaagataaatagtttttaataaatttaaaaaatattaaattatagatgaatttaatattaataattaaattaattaattttcataaattattgaattatgacttataattaagaaggaatggagtaagatttatatacattatacacaaattcaggagaagcgtggggtttccctaactgaaaaaacgagttgcaatcacatcaggatccattctcagttgttcgccatttaattagaagtcattgtgatgatattgttggatatcatcacagtcgcaacttttgatttgttcctcaactactatcagctcacgggtgaaatagaatttttcatttacttccttttcttatgtcgacaattttttctttatcgcatcctcgctattgttgttcattaaatttttagaagttataagattttatatttaggatttttggatattataaaatataagaataaaaagacataatcttgatgaaatctaaaatttaggatttcaaggtacttaagtaaagagttatttcaaaataaattatgtaaatatatctttgctttagaacacgagaacgatgcatggaggttgaaatatatattcaaggtttttaataaaagaggtattataaaataaatcattaaatacaaatcataaaaatagaatcttactaattttaaggagaactacttaatttcatgaacttagaatgatttttaatctaatttttatattcattttatttttgttatcaagctcgtcttaactaattacaaaaattcaaagagtaaattataattgtacctcctgtgttttgctcaaatttcatccgatactcatccctttttacaccctacaaaaaatcccttaatggtttaatttacattacacttagaccccctccttcctaacaccgtttaataatctaacagaaattagacacatgctggtcacatgacttttaatgaaattttatatctaaaatatcctcatctttttcctctcaacctgaaaatattttaagactcttgtttcttttttgttttttctgtaattggacgtaaaccaactttttgttggatgtgaacctacttttttggtacatagtgttaacacccttccccattttcagcacatcatgatcagtcttaagggacttgttcacacagtcatgtattccatgtattccagttcatccattatattcatgtggtcccaaccatcaacactattttaatcaacaaaaataaacaaatgatttctagtcatccattgtgtttgatgtggtcctaaccatcaacactattttaatcaataataataaataaatgattttaaaaatcataagtggtcccaaactggtcccattgaaaccccattcagaaataaataacaattaaccatcaaaattaaataaataatcttaaaaagtaatctatatacaaggtccagtggtcacttataatcataaccttagcgtgaacagaaatcgtggaacaggaagaagataaatagagcgctcgtgaacgtcgaagaagaagacaaacggaggcactcgtgaacgtcgcgagaactggaaaaggaacagtggagaactcgtgaacggaaagaggaacaatgaagaattcgtgaacttgaacaagaatggtgaataactcgtgaacagtgaataggaattgaacgaatatcgtgagagaaagaggaactcgcaccccctagacgctcaagaagaactcgccaacaagaggaagacgaacagtaaatggtgaagagaaatgaaatgtgaatcctaaattctgaaattaattgggaaagaataatttgagttttacaattaaaatgtaaagaccattttatctgctcacatatttcaattgacattaattaacgatgttaacagaagagggtaaaagtaatgtgtaaaaaagaaggaataatagatgagatttgagtggtgcgagtgtaatttattcgaattcaaattcaatgcatgtaacagggattatctttggtccaatagtccacacgaaatgattaccaacaaagattattgcaaggtgtgaacaacttattggtataattaacaagtaacaattgacttaacaagttattgcatatttttgtttggtacaccgtccaaacgaaattttactttatgttttttaccagagaaattttactttatttattttttactagttaaattttacttatcctgtgtaataaattacactataatcgataaaatgaaaccatagtaaaagttaagtatttttaataagtttgttaacctctatattttacagtaaattttggttttcatctttataaacttttttttttattagttttaatctttataaattttcaaagtttaaaaattaatttctttgatatgtgtttaaataagatatattacatgtcatttcaaaataatagttggtgtgannnnnnnnnnnnnnnnnnnnnnnnnnnnnnnnnnnnnnnnnnnnnnnnnnnnnnnnnnnnnnnnnnnnnnnnnnnnnnnnnnnnnnnnnnnnnnnnnnnnnnnnnnnnnnnnnnnnnnnnnnnnnnnnnnnnnnnnnnnnnnnnnnnnnnnnnnnnnnnnnnnnnnnnnnnnnnnnnnnnnnnnnnnnnnnnnnnnnnnnnnnnnnnnnnnnnnnnnnnnnnnnnnnnnnnnnnnnnnnnnnnnnnnnnnnnnnnnnnnnnnnnnnnnnnnnnnnnnnnnnnnnnnnnnnnnnnnnnnnnnnnnnnnnnnnnnnnnnnnnnnnnnnnnnnnnnnnnnnnnnnnnnnnnnnnnnnnnnnnnnnnnnnnnnnnnnnnnnnnnnnnnnnnnnnnnnnnnnnnnnnnnnnnnnnnnnnnnnnnnnnnnnnnnnnnnnnnnnnnnnnnnnnnnnnnnnnnnnnnnnnnnnnnnnnnnnnnnnnnnnnnnnnnnnnnnnnnnnnnnnnnnnnnnnnnnnnnnnnnnnnnnnnnnnnnnnnnnnnnnnnnnnnnnnnnnnnnnnnnnnnnnnnnnnnnnnnnnnnnnnnnnnnnnnnnnnnnnnnnnnnnnnnnnnnnnnnnnnnnnnnnnnnnnnnnnnnnnnnnnnnnnnnnnnnnnnnnnnnnnnnnnnnnnnnnnnnnnnnnnnnnnnnnnnnnnnnnnnnnnnnnnnnnnnnnnnnnnnnnnnnnnnnnnnnnnnnnnnnnnnnnnnnnnnnnnnnnnnnnnnnnnnnnnnnnnnnnnnnnnnnnnnnnnnnnnnnnnnnnnnnnnnnnnnnnnnnnnnnnnnnnnnnnnnnnnnnnnnnnnnnnnnnnnnnnnnnnnnnnnnnnnnnnnnnnnnnnnnnnnnnnnnnnnnnnnnnnnnnnnnnnnnnnnnnnnnnnnnnnnnnnnnnnnnnnnnnnnnnnnnnnnnnnnnnnnnnnnnnnnnnnnnnnnnnnnnnnnnnnnnnnnnnnnnnnnnnnnnnnnnnnnnnnnnnnnnnnnnnnnnnnnnnnnnnnnnnnnnnnnnnnnnnnnnnnnnnnnnnnnnnnnnnnnnnnnnnnnnnnnnnnnnnnnnnnnnnnnnnnnnnnnnnnnnnnnnnnnnnnnnnnnnnnnnnnnnnnnnnnnnnnnnnnnnnnnnnnnnnnnnnnnnnnnnnnnnnnnnnnnnnnnnnnnnnnnnnnnnnnnnnnnnnnnnnnnnnnnnnnnnnnnnnnnnnnnnnnnnnnnnnnnnnnnnnnnnnnnnnnnnnnnnnnnnnnnnnnnnnnnnnnnnnnnnnnnnnnnnnnnnnnnnnnnnnnnnnnnnnnnnnnnnnnnnnnnnnnnnnnnnnnnnnnnnnnnnnnnnnnnnnnnnnnnnnnnnnnnnnnnnnnnnnnnnnnnnnnnnnnnnnnnnnnnnnnnnnnnnnnnnnnnnnnnnnnnnnnnnnnnnnnnnnnnnnnnnnnnnnnnnnnnnnnnnnnnnnnnnnnnnnnnnnnnnnnnnnnnnnnnnnnnnnnnnnnnnnnnnnnnnnnnnnnnnnnnnnnnnnnnnnnnnnnnnnnnnnnnnnnnnnnnnnnnnnnnnnnnnnnnnnnnnnnnnnnnnnnnnnnnnnnnnnnnnnnnnnnnnnnnnnnnnnnnnnnnnnnnnnnnnnnnnnnnnnnnnnnnnnnnnnnnnnnnnnnnnnnnnnnnnnnnnnnnnnnnnnnnnnnnnnnnnnnnnnnnnnnnnnnnnnnnnnnnnnnnnnnnnnnnnnnnnnnnnnnnnnnnnnnnnnnnnnnnnnnnnnnnnatatatatatatatatatatatatatatatatatatatattcacttcacaggggcacataggtggaagtttcttcaatttgatattctaaaaaaattaatttcacaagcaatagcgtcatatcaaagattggtgttaacgttgggctcaaacgggtcagcccatcaagaaaaggagaaaaaacttatgggtctcaaacttcttagtccagcccaaaacaaaaagttatactaactacttaggagttaggagaggaatagtgataaaaatctttgtccaataaagaggaattttagcttagttaaagtttaattgcaatagaattataaaagaaaatattaattaaaataatagcaagcaaataaaactctaacttatttttttgtgtaaacaatcaaaataagaaaaataggatgtcacattattaattaattttagtatttttctaatcttacgcataagtttataattaattttaaaaaagttctttcaagattttatcttagtaaaatataattttgaaaacaattgcagactttgagactactatctattatttgaaataatattatattttcatattagagaaactgaaaaaagagagaacgttgcaattgtgtaaaaaagtaattttaaaatatttaatgaataaaattaatattaacaatataaaaagtaaaaattaaaagaaaaatataaggatttaaaaaaaattcgctttaaaaatcttaaaaataaataaaaataataatgatgattaataaaatataaaatattattttaatataatctaattagacattttcttgaaatattggagcttttattttggatttgtaaaaaaatatatactatcatctaataaaaattgtgcgataaaaaactaataaaatatttttaaaaattaataaacttaacttatataacaatttgtgatttaataccgacaaactgttttatacttttaattctcaattttttctccatcactttccattagtagcataaaaaagttgtcatatactaccaagtactaacacacttttatacagacaataataaaactcacttttcacctttttgctttttttttatagaatcttattaatcagtgtcaatcaaatattagttaaatattttaaaaaaattatataagttataaaaaaatcatgaacagtaaaaaatttcacatcttaatgaaaatatttcttattttattaattgtaaacagggtaaaattaaacttgtcaatctattttctcttggtttagtcaattaattaaacaataatgaacagaatgaaattgtgaatcgacgacgtattttggtgcgtgcaggtcccggtgtttgaattggggtttccgtttcgattgtacctaccagccaacttagggttcagtcactctcgatcacaccgatcaccaacgtggcttctcctcctcaggttctctctctctctctctctctccccccttgcttcaatcattctttctctttttctgttacactgattgtttatattttatcgtatgtttttattttttttttaattttaatttcgtatgttgagggtgcaacttgttgggactgtggattggttagggatctgatgcgtttgtttgactccgatccatttttcgcggttttcgatttccagacactcaacttaatgtgagatttctaggcttgttactcatgtttctattcgtttgattaatataatttgttggatcgtggagattcttcatgaacctaatcccagagaatgaaataaaaataataattaaaaattacgtatctcattgcgcgcgcaaataaaggggaggaatattgtatgcagtcttatccttgcatatataaagagtcaggagccctaaagcttgttttgggtttccgataattgggtaattagtttgctcctcctcacttttggtggcaaaatgaacatgaagtgaattcaaattgagacagacatggctgctgtggtgacaaaggtggatttgtaattgtgaaatatggttttattatgttcataggcgaatggaaatttgtataaattggaggaaatgttcttaatttcgtttctcaagctcagcgtcttgcttaacaagtaataggctattagacttgtcagaaatcaccaaccggattgttctttccaccatggcatgctgagggtcagcttctttttttcttttcaagctagaaagctgtttatgagcaggaattataagattaatagaatggtgtatgcatatagtatatgatttccattcccttttatatgttggcaaactaacttttatttttatatctgattacagaacatggtactgtgtatatcctgttttatactttatgttggataaattgttttagctgttggttactgttcttttgtttatgggcaatactttgtttctgcaggttccctaagtcaactttttggttttttgattgttgaggatggtgctggttttagccatgggggatttgcacataccccacagggcacctgatcttcctgcaaagttcaaatccatgcttgtccccggcaagatccagcacattatttgtactggaaatttgtgtattaaagtatgtccagcttattgaaataactatttctgattcagttttgactgttgccgtgccgcattggaatgtaatcaattgtctctactttatagttttcaacttatattttatgaaagcacaagggacaggggtatgaaggtccaatttttttaacttgccttttgtcttttgacaatgaaatgtttgtcttttaaaaaaatctcgtagttgtaagatttgagttcattcagaaaggttatctctcattacaatgtgtgtactagaacatttagctgtaggacacatcagattttgttttgtcacacccaccttgtctgtgttatgtcctgtgtcttcgtcattgtccatgcttcttagaaagaaaattggactattgaaaattttgtaaaactgggtaatcccgggcatgtgcatggaaggtttgtaatcctgtggccagtggtgaagccatgttaaagcctgatgggatactccttaatttttgtgtagcatagggcaaattgaaagatgttcattgtctcccccaccccgttttcttgttgattgatgaaacatcatattttttttttctgtaacggtgtaaccaaaaacattttcttattcatataaaattggttttcaagtccatttatatgagggaaaccatgttatttatgacaacagaatgggggtttaataatgatttatgttgttttactattttgccattggtatcatgggtactgtcacattcttgtagcataacttctgttcatgcattacttacccccttagtattatccatctgcatctactaaaaataattcagtacatttgttacggttctattttttatatgctatttattttattcacattaacttgcatgatatggaattagatatgtttttagtggttgaatgcataagctaattacctcatttatcttcaggaaattcatgactacttaaagactctttgtccagacttgcatataactcgtggagagtatgatgaagagacgaaatatccagagaccaaaacactaaccattggccaatttaagctgggactatgccatggccatcaggtctgattttgactgatattatttgccctttattttttcttaaatggacctaagaaaattgggagcatggatggatcataaggaaattacctttgatatactagtacaaaaatgaacttctaaaggtcaatgactaaggacttattcgggattaagtcaaaggttttaaaattccaattacaacccacaaaaaggttgatttatttttcacccaatcaaaatttctgtcacaagcttgcaatccaagagccaagcatggcaaatggaaaccaccattgaccctgtactggcaccactcaaagttaatcactttccaatatgctccctcattctagaccccatctagatattattttcttggcagttgataagtgctgcactctgggttttctgatcaaaggtctatgattttaggcaagtataaaaaagtgtttggataggagtagctagtcattcctgtatgttactttgggccttgctacagctaacagctttaatctgagctaaatgatttacttcattatgctactttaggttgcgcttgtgtaggtttatttattctctttcttatcttggttgatggtgcttaacagatgcaatttacatctgttttatttttttgttgcagctgcaactttttccattcaaccatattcctcctgtgattggatttttatgaaactgttattagttatgtttagtagaaacttaaaccgcgccgtattatgtatttttatatgataattatgagtgcttaatggttgtgaaggttattccatggggagacctagactcactggcaatgctacagaggcagcttgatgtagacatccttgtcacaggtcacacccatcaatttacagcttacaaacacgagggaggtgtggttataaatccaggttctgcaacaggtgcctacagcagcatcacttatgacgtgaacccaagttttgtccttatggacatcgatggtctgcgagttgtggtttatgtatacgaacttattgatggagaggttaaggttgacaagattgattttaagaaaacatccacaagcaactctgttcattaaacactaggattttggtcctactctcttttctctttctctttcttatttggctgtttagttttctttttcctccttcaaacttttcaagggtgtattgattttagttgtattttgctttgtatgtacacttgtatttggccatatcataggattttaggatttggtaaatttgtgatctgcgccaaacgtaacgactgattgatcagcaatggctttgtgtattattactccttttaccagttgcccagagatgatatgcagcaaaaagaaaattttattgtaaaaaggtaggaattaagttgggaattgatcactaaaatttggagagggatacaagtgtatatattgtatttgtgcatgtcaaagtaattataaaagaaatagaagcaaaagaaacaagaaataaataaaaaatggagaagaaaaaaatattataatctagtagttatgtttttgagaaaaattcataagaaattgtcaaagtattgttaggaaattaaggattcacaaaagaaagcattaaataaaaatatatttttattaaaatttctcctgcaattaacaagtatattttttaatatgaaataagctaattagtcatacatttaatattacatttttcattaaatgtgtttagtttttttctcttaacacaaatgcttaagacattatactcattatggtttgaaaaatgaaattgcgtgaccgatatctataaaaagtatctaatgtttcttattaaaaatatataaaaaaaattaattgacttaattatatttttgtttctataatttattaaagaaaaatgttagcaacatattctcttttaatactctccaatctttaattcattaaaatttattaaaaataacattctttaaggcttgacaatctatttaatgcagacatcttttatgattttgtggtttccaacgaaatttaaaaagatctatattaattttcaagatattattaaaaaggttattttaatttcaattaaaatacaacatatatttgaagatattattaaaaaatatttttatttaaatttttatgaccaaattaaaaaatactttaaagaattaaaactaaaatttagattagaaaaactaaaattcactaggaataagaatactgcttaatggaacgccattgccttgactaaattttaagaaagaaagaatacattgcatacagttatactttggtttgcgttgtggtaaagtcaatggatcctcaggtttggcacaaagttgcagcgatttcaggtacaatccctttgttatcatgccttcaccatttcatcataatccatacccttttcttcagaaactataactgaaactgaaactgaaacattacaggagtggcagcacttggattgggaacctatggtgcccacgtcttcaagccccaaaaccctgcttacaaagatgtctctttctttctaccctttcctttttcccatttcattttcatttctattgcatcatgaagcttgttttaattggaatctgtttgtgaaggtttggaacacagcttcgctttaccatttggttcacacagctgccttagttgccgccccaattacaaaacaccccaatgttgtaagttcccatttcccaattttcctactttctcttccctttttgcttgcccctttgaaaaaaaaaatgctattttgctattatatggtcattgtagtgtagagtgtttgtgaactgaaaacatctatttgttttttgactcatcaagttatcattttttatttttttgcagtttggaggccttctaacagctggtatcttggctttctctgggacgtaagtgctatctctaccgttgctgtttaaatgactatgtttccattgtaccatagaattctcttccaactatttgtgatgcttattttggaactagagtaattttttatttatatatttgggggactatttttttaacggcggggggtgaaaaattgtagacgggtatagtgatagtgttcccataagttttctcaaggttaactaggtcaagttgagatacatctgttcaggagtcaggacattgtggaagtttatgtttaagccaccaaggtttaaaaggctgagtcattgccacattgatgttgaagatgaatagtttatttcattgtcttggttgcacaataaaagctaggtagggtatcacatatattgtctgaagtattaggtttggactgttggtccaagggatccttggcaaagtgattagaagtgagacattgatttcaacatgggaaggaaaccatagttatcaatagcggtcgtagcggccgggatcacggcggagtgggcatgcaccgctacaaggggtagagtagcggtgcgttttaaggttgcggatgttgcggccacgacggaggggaagcagagcgcccgcgatcgcggtgacgcgtccgtgattgggagtgcgaccttcgacatgcgctgacgatcctctcttcttcgacctgcgccgacgattctccctgctcaagcggccagctgcttttccttctccggcggccaacggctcttccttctctggcggccttgtctggagtcatctctctcttctctggcggctctttcttcttctctgtcgaggtcgagatttttattctctgtttttgtttctttctttttacgacgaagacgtgccgctcagatcgaagcagcggcatcgcgacgacgacgaggaggcgaagaaggtgaagccgaagaaccctaaggtgacagtcgcggaggcggcggcgaagatcgacgccgctgatttggacgctttcctcattaagagatcgatgccgctggtttgattgaagatgatatgatgcgattgtttgatgtggagacagtggagtgcatgacagctttcacccacacttccattcatacttaaaaaaaaataaaaaagttaaattttttgtttctttttatttttatctttttaattctgtttcttttttcttttttgtctttttaattctgttttttttttttaaaccaagtttgatattctctgtttctctcttagttttttatttctgtttttttcttttcttaatatcagattattcattttctttgtttattttgaattttaatttgtgtttgcctattttgaattttaatttctagaactttagtaacatttgactttagagggttcaatacttactttgtagaattgtttctttgacttttattgacatctactattctattttatattttgcttaagcgtttttattgttaatgataattagtgcatgaatttttagttatatttttctttttcagcttatatatttatattatatttttttaatacatatataaaaacgttagaatagcggtcatcccgttatccgctatctcagttttgagggcggccgctctgctccgctatccgggattgataactatgaagggaactactgcataattttgtcctcagaactgaagggaaaactaagttatttatgttaatgatggaatcatgtataattgcttttactaaaccaaagtctgggtccaaactctataaaaatcaaatcactaacttcagagtcagagatgccaatcaagggatggttaacccggtgcttaagaagacgagcagggcaccagttatcttcagagttatgcccatttatgtcatatcatatggttgacacttgacaatgctgtgggatgtgaccgtgtttattattacagggacttacaaccctataatacctcaacaaagataggttgtctacttaggtacaacggtgatgtgagtgtgtactaagattctttaggcgtgtttttttagtggggaaaaggaaatagaaaaactagcaatttgagtttttgactacccaaactgaagaatgaagctgcttgcaaacaggtctaggagatttcaatggtccctatttgtgattggtgagtcccagtcatcccatgaaatacacagatcagagtgagaattatttgtagattgaagtttggaaaatactaacatatttatttgtgatctgactttcattatcttcgtgaaacaaaggagtgcaaagttctagaatttacatcccattgtttgaagcagttatgcattatccaatattagtgtttgtttacttgacttgatgatgagcaggttggatggttttgacttgttcattcttgagaagaagaatattttattctttgaacctctgtagtaaaccaaaaacatacatattttgtgtcagattttgaagtatcttatgtcagatggttctgcaattcacttagaatgtggtctgatgccattttcagctgttgcatatagaatacacttataaattagactagcctataacaatattgtcttgctgcatgctgattttttgtaggaaatattggtaaaaattagaatgatcattaagctgtattcattatgatattgaagtaaatgttgaatttttaggtgttatactgtcgcatttcttgaagacagaaaatattcaaccatggcaccatttggcggctttgcatttatagctgcttggggtagcttgcttttctgatgacatcggctctgcatttgttactaagtaattacactatcactgaatcaactgttgcccagcccatattatacttcatattttgtaaatcttttaccatttgtcttgccaatggtttatgatcatgaaatatatgtatctaccgatgatgctaacagattgaagatattctgttgattgttgaagctgattatgtgtagccccatccttagccgaagtagtagtaataataataataataataaaacaactacttatataacttttagctataaagcataatattccatgtgattgatcataagactaaaatgaatttagcatttttcagttgtgactttggctcctctttggtgctggatacatatgagcaccagctttggccaagaggaaataaattgtacaaattaaatattagtttgaaaccaatgattaagcacaaacgattaatgtgttaaagttaagattaaatcgttcggataatatcttagtttaattcttgtcagaaacaattcttgaaaagagtttatttacttttcagttgaactctggattagttagtgtcctctttttgctgatgaaccttagggttaaaatataaaagaaatagtttgatatatggtgtggttttgaaatgcaaatttaaaaaaatataaaaaaaaatctccttctaagttctacagtaatttttatttttttgtgaattgaattgtatttgttcttaatgctctcttgtgaatgactctcttcagtatttacaattattgaatagggttagattgtatgcatctgtgtttgtaatttcttaaacttaatgcttattactaattttgtgcgcctaaggaattatttttcattattaagaataaaggtttacttgccaagaaattaaggataagttacattagagtattggatgttaatcacaagaagagaactagatgagaaagaaattactttaggggaaaactaaggatattctaatacctacctattttcttctatttttttatcagcaaaacataatttattaaagaggtgaaaagaatacaagatgtatccactcacccaacctattttcttctatttaattttctcataattgtttatttattgtgtcttttttttttaatctagtagaaacctaaaattaatcgatcctctcataatttctgaattgaaagagtatgagttgttaaactacaatatttgtgaagacgatactcttacacagctagtagatttgccgtctcttcaaaaaactacttaaataattgttatcagattcaaactttaatgctttagtatctagcaagtatagctaaataaaaacatttagacacatttatttatattatttatagaattcaatctaatcccgagcattctaaggaaggtatcaactgagaattcaaagtaacaggacaagagattatcttcaattcaatccagtttaatagaattagttgataacttccttaatgacatacataaccaccgtttaccttgttacctatatattccttcatctcactataatatagttcattttagaaatatcgagacttattttcatttatatatgcttacatcaacatacagacgcgtacaaccatataacaaagttataaactaaaagaataataataatttaagaaatattttaacaagaaattcagatatagaatatgaaccgtcgtccatcaacacatttgaccttatcaaatggtccgagtttgtttctgttcatcacctaacaccctcttgaaaaaaatttgaagctttgcttagtgtcttcttcaggcgaagaagactaagtgcacattacagaatcctcctaaacaacagttgataaatccacgccaaagaggagcatgcatcttcttctttttgctataacttgtcagcaaagttgcaaagtattattgtttagtttgtgaacgtgaaagcttcaacatgttaggtggagaatcctcctcaaattctccgaatgcgtcttcgcgattgacctaccatgttttcttgagttttagaacagaaggcacccatttagattttgctaacaccttatgtacttcgttgcagcgaaagggaatctcaactttcagatatgataaacaagtggagagaggatatgtgattttggaaaaactacataaagtaattgagcagtgcctcgttgtcattgttcttctctccgagaactatgcttcttccacttggtgtttggatgaactccacaagattcttgaatcgaagagggagctggggacaccagtttttcctctcttttatgatgtcgttccttccgatgttcgacaccagaaaaataaattcgctgaggctttcgaagaacatgcaacaagacatgaagaagacaaagtgaaggtgcaaaaatggagagaatccttgcatgaagttgctggtttttctggctgggagtccaagaattggtaagttttgcttgtgttattttaactgcatgtataagtaggtaaatatgtttttagttctctaaaatatgtgaaatatgaaattgatccctctaaaaaaaaaattcccatttcagtccctctaattttaacgtgtatcacaactttttttttgttgttaaaattgttatatgaatgccttagacaaaattgttcaatcttatatggcacgtcagcagattcgttaatactgtatgaacactaacatattaaaattttaaaggaactgaaatgggataaaaaaatttaaagggatcaactatttatcattaacctaatagttatatatatcatacttccatctatcattaacctaacaacattgtttgaatgaaaatccatgcttcaatttaacaaacaagtactgaatgtatattggttttagagagctcaacatataaaaattagcgaagagctttgttatattttattgctagtgacacttgaattataataaaattatacattttcattaataggaaaaaagaagagctcattgaagaaattattgaatcggtatggacaaaactacgtcctaaactgccatcatacgatgagggactggttggaattgattcaagagttgagaaaatgatttcacttttgaaactagaattgaaagacgaagtttgctttattggaatatggggcatgggtggtatcggaaagacgactctagcgagagttgtatttaggaaaatacgtaacaaatttgatattagttgcttccttgaaaacgtgacggagatttctcataatagtgatggcatgcttagcttacaaggaaaacttctttctcacatgaaaatgaaagacttgaaaatacaaaatttggacgaaggaaaaaacatcataggaggtatcttattcaacaacaaagttctcctggtccttgatgatgttaatgacataaggcaactagagaatttgggtgtgaatgatcaaaagtggttaggccctggaagcaggattataataataacaagagacatggaagtactaagatcacatggaacagttgaaagttacaaaattgatctcttaaattctgatgaatcccttcagctcttcagtcagaaagcatttaaaagagatcaaccattagaacatctattgcagttgtcaaaagtggctgtccaacaagctggaggccttcctctggccattgagatgatgggttcatccttctgtgggagaagtgaatctcaatggaaagaatttttggatgtgaaagaatacacaaataaagatgttgtgatggacaaacttaaaataagctatgatgggttaccgccaaattataagattttatttcttgatattgcatgtttcttcaatgggtgggtaaaagagcatgtaagacaaattctaactatttgtggccgttatccagcaaatggaattgaagttctaattgataaatcactagcaacttatgatggatcacgtttatggatgcatgatttgcttcaagaaatgggaagaaaaattgttgttgaagaatgtcctatagatgctggcaaacgcagtaggttgtggtcaccccaagacactgatcaagcactgaaaagaaataaggtaattttagttgattttatctcatacaaaagttcaatgaatttatatctttactccttatcatagttaacagaattgaacacactacgttgatctttcatatgtcatgttgagtttggataatctttattaaatccttgctgaacttgaggtttataatgagcttgaaatgtaaagaacctcccttcagtccaaacttttgtaaaccaaaaacaatccaaatcatatatatgccttgagagttaagattgattatcttcagcattgtttgccaggaaaatgaattgattcagggtatagttttgcaatcatccactcaaccatacagtgcaaattgggatcccgaagccttctcaaagatgtacaatcttaaattccttgtaattaattatcacaacatacaatttcctcgtggcatcaaatgtctttgcagttcaatgaaatttcttcagtggacggggtgtactttgaaagctttgccacttggtgtgaagctagaggaacttgtagagttgaaaatgcgttacagcaaaataaaaaaaatctggagtgaatctcaagtaagtagctcaggaaaaatatcaatttaataatagcacaatatcttctaaagctaatcattctcaaatttttgttctgattgatcagcatttcgcaaagttgaagttcattgatctgagccattccgaatatttaatagaaagtcctatagtttctggagttccatgtcttgaaattttgcttcttgaaggttgtataaaccttgttgaggttcaccagtctgttggacagcacaagaaacttgttctattgaacttgaaaggctgcataaatcttcaaacccttccaacaaaatttgaaatggattctttggaggaattgattctttctggctgctcaaaagttaaaaagctccccaacttaggaaaaaatatgcaacatttatcactgcttaatttggagaaatgcaaaaatcttctttgcctaccaaagtctatttggaatctgaaatctcttaggaagctcagtatttgcggttgctcaaaattttctaccttgcccaacatcatgaatgaaaatgggtctttggaggaacttgatgtgagtgggactcccataagagaaattacttcgtccaaagtttgtttagaaaatcttaaagagctctcttttggtggaaggaacgaactagcatccaactcatcatggaacttacatcaaaggatttcaatgcgtaggaggcaacaagtcccgaaggagttgatcttgcctactctgtcccacttaacaagcttgaagttcttgaatttaagttattgtgaccttaatgatgaatcaattccagatagtcttggatccttattatctttgttgggcttaaatctaagtgggaacaattttgttagtccacctactcggtgcattagtaatcttcatacccttcagagtttgaccttaattgattgcccaaggcttgagtctttgcctatgcttccaccaaatgttcaatgcttgggtacaactaatagtactcaaatgaaacccttgaattcagatgcatatatgctgtggaagatctatgagttacatatgaatcagacatactttttatatactcattctctccctactctgccacttcgccacccaaattatttccataaagtgtgtgtttaccaaatggaagatagaccacattttttgttcatcattccagggaaagagattcagaaatggaatgaagagttctttctaattgatccatcacatcatccatataacaggctgggttctgattcagttgcatcaataatagtggatgttcctaactacttagtgtctagtggatggttaggaattgcaatatgcctagcattagaacctccaaatatgcagcactcttgtccatcgcatgtgagtccacatcctgtgggaaatgaggaaacgtgcatatattattgggcatgtaaagttcctcagggtgaacctgacttgactttccccataggacctaaatttagccacttagtttatgaatgcaacgaagagaaatgccaacttcaattgatattttatgtggagaatcattctaagccaagaataaggaagtgtgctagcgttatgagattttgccaagaataaggaagtgtgctagcgttatgagattttgccaagaataaggaagtgtgctagcgttatgagattttgccaagaataaggaagtgtgttaccaattccccttttaattactatttaaaatatataacattctgatcaatagattaaaattttcagttagtaactttcttgtatcaccactgtttatcaattcccattttaatatataaaatatagcgcatgatatataacaccaccactttatacccaatcacctctttggtcggtcactgcatacaatataatttagtatggtttattcccgtacaattaatttagtataattaagtctccttttgctagtaacttaagaattcagcatatacaagtcatagacatgataaacttaagaaatcataataatgcaataaacaagatcacaagaaagtgagatatatggagtttcaaccatccaacagtattcaacctgcatcaatggtctgaattacactacttgttcctatcatgacctatccatttatttaaaaattcttcctcggttgttatctacaaactctccagctagtgttttttgctcggagagaccaagggaaggtttcagaattatattattcaaagaactccacgaaccaaattaaacaatttgttgtatccaccaaagaaggatattcatcttctttgttcacaaaaacatgatatgagctatgttgctttgatggttaaacatcaattgaactattctttccgaaggcgcatgtgcatgtgcatgacaaagcttcaatgttacgtggagaatcttcctcaaactcttcaagatggacataccatgttttcttgagtttaagaggagaagacacccgtttagattttacagatcacttgtatgctgcgttggtgcgaaagggaatcataacttcccgagatgacaaacaactcgagaaaggagatgagatttctcaagaactccctaaagcaattaaggagtccctcggtgccatagtcatgctctctgagaactatatatgcttcttcctcttggtgtttggatgagctcaacaaaattcttgaatcaaatagagttcttggattgaagtttttccagtcttctatggggttagtcctcatgacgttcgacacaagacaacaaagagtttggatgaggcttttagtaaacatgaaagaagatatgggaaagacactgaaaaggtgtaaaaatggagagattccttgaaggaagctggccaaattcctggctgggagtccaaaaattatcagtaagttttgtccgcatcaatttttcatttggatagtgtaaaattgcagtctcttcaaaaaaaaaaatgctagccaattaagtcatattattttaaaattcagcaaatttcatctcttattagtttacattaaaatataattttcaatgaaccaaatgtatcttttgtaaaatttctattcgtacttgtctcactcacacccttaatagatatctattgttggttttagttaaacatacatgtgaaaactaataagcttttcttccatttttattaatgtttaaagtgtgacatgattatatttttctcaaccacaggcatcaaacagagctcattgaaaatattgttgaatcagtatggacaaaacttcgtcctaaaatgccatctttcaatgatgggctaattggaattggctcaagagttaagaaaatggattcaattattctaagcatagaatcgcaggacgttcgctttatcggaatatggggcatgggtgggagttgtcctccagaaaatcaaggatcagtttgatattagctgcttcgttgacaacattagagagatttctaaagaaagcgatggcatgcttcgcttgcaaacgaaacttctctttcataattggcaataaaaggcttagaaattagcgatttggacgaaggaaagaacacaataataaaccttttagccgagaagaaagttctacttgtccttgatgatgttgatgacactagccaaactaaagagtttgactgagaggctagagtggtttggtcgtgggagcagagttataatcacaacaagggacacacaagtactaatatcacatggagtagttgaaaattacaaaattgtgttcttaaattcagatgaatcccttcaactcttgagtcagaaagccttcaaaggagatgaacctcgagagcactatttggagttgtcaaaagttgtagccaaatatgctggagaccttcctttggtcttggagattttaggttcatttctttgtggaagaagtgaatcccaatggagagaagttgtggatatgataaaagaagtccctgccagtcatattgttaaatatgaaatcgcttagaataagctactatgggttatcgtgacgtcagaaaactttgtttcttgatattgcatgcttctttaaagggagggtaaaagagctcttgctctagaaatttgtgaccgttatccagcagttggaattgaatttctagttgaaaaattattggcaacatatgatggctttacaatagggatgcatgatttgcttcaagaaacagcaagggaaattgttaaaaatgttgaataagtttggaaacatactggaagctgctgataattttttttttatatgcaattcttatttatgcttttgtctaggatgggacattaaattattctttatccatgcacttgcatggaactctacaaaaaaaacgggggttttgtccacagaaactgcaacttgaacaatcccatgatccccaaccaaacatatataagtgctacttactagtttgtaacatttatatatatactgtacacacatgcagtttgccaattgctaacattttggactgtcaaattaatatgtagattgtgataatgcataatggcatgggtttggatacgccttctgggaagctagagacacttgtcaattttcatggtatcagtctttaaagagagatatgttcatagatctgttgctgatcttgcttcactcgagtagtacctttcacctcgtggacatagtggcacaaactattatagccagcttcccttacgttttgttcactgtagttttgcatgcgttgcttatttttttagttatgccataagaaacctttcaaagaaagttctacttcttggctactttgttgttgttttggttgaaggatcctcctatgttttccctgaatcttatgtatataaccttctcctttcgccgaacataaatataaatagccaattaagcagcatatattatatagtatagttccaatatagatgttagatatagtcaaattgcgtatctcccattgtacagtaattttgcttttaaagatcctagaattaaatccttattatcctgtgatactgggagtcaaatacttagtaataggtcaaaagttattaaccaggtataaacctgtttacttaaatccatgatcaaatatcacagttcagtgtgttgggttataaaattaattttgaagtgttataatttatatttggatatttttataggaaaagcaaattgatagaaaaacttactgtaagaaaatttatccaatacaaaaactacttaaaaatatgtggaagtttggaatgtggtgcattggcgtcaactcaattattttttttcaaattcacagtaaagcaagtcttagttacttctaatttttcaattatctaccgcaactttggaagccggaatcaattcagctttgtatccaaacacatgcactactttaaattagaatcaataatcaatccagaactaattctttaacgtcaaactaatattgtgacaacatgttgactaatctttcaaaataattttaaagaattcaagatgaaactaaacacactctcaatatgcacacccaacggatggaacagattgtgttgtgtgttctctatcatcctcttttctatggtggggtatctttctgacggacgggttggcttagtatgaccagtgtctgactttctgttggtattatcaaattggtgctgtttttgccactcagcacaaaagtagtcaatctatctacttggtgatttctatgtcatgtgatttttattttatttcagactaattagtgagtgtgttttgttgatttgtttatttttacttggcaacaagaattgggttgattatctgcttcatagttggtaattctatatcttttcaatcacaatcatgagcaagagaactgaattaactgcaatgtatgaggcaattcaaatactagtgctataaactacttataaagatctcatctaatttttcagaagctgacgtgtataaattaattttaattcattaaaaatactgattcatttcctataagtgttataaaaaaatttactgtagtttcagcccgctgttgtgtgcatatgaaaatatgatgtgatgcgtcaatcggtgttggttcttgagttctttgttgttgctgggctgactataaaaagggtgaagaaataatgtttaaaatgtaagattaataaaaattgtattattgatagtaatcataattaaaatgaaaaggtcaaaatacaaaaaatattctagggattaattaaaatgtaaaatagcacatgcatggatgcaccgaattgaagagaccaagcacatagtagacaaaatgtcatatgaccaatgcccgaaatatcatactacgacagtgacagaatttgaaaccacaagatgacatcaaagagttgttgctgtcaaagtaatcatacgatcttcaatatcatcaatgtatagttcccaatatgatctcttatatatatatatatatatatatatatatatatatatatatatgctctctaattggactcgcagcaagaaactgtggcacaagatagtgtccataaatgaatgatttggaaattggaatcactgtgagaaaaaacatggcatgtgacttaattagaggtaaatgagaatttgggtttgcaggaggagagagaaaccgacttctgtaactgagctcgtggttcaagcttcaagaatagatagcccaacacccaccaggtggcgcaccacctactctatttctccactttcaatggaacgtggatttttcttcagttttttttttttttcactctaattgagtcgtgttgttgataaaaaactgttaaactgggatgttggaactccttttgttttgatccattcaaaatctttttttttttttttaagaatcacacaatatatttctattgtgataccatatcctccctttgtttttagaagaaaaaaaaacacattttttctgaataatcatacatttcatgggaataatcatatttgaatttattatgatcatgaaataattatcatgtctgagagtcaatattactcactaacctttggtttagttgagatgaaatcggtgaaaaaagagagaaaaaatcattatttaatatggatgtcagaacttacacatttattacactacttcaattattttattttattttaattttctttctttgtttcattctacacaaccaaaccatatatacctgtggcagtaaaaatggaacacgataataaataaaaggagtaaatgattaagtccgaatccttaaattggcaggagtatgttgcttgtccgatagtattgactattgcgaataagataaagcttttaacaattattaatatagaaatacaaaatcaattaaagaaataaaataatttaagtttcttatataaattaaaattaatttacattttaactatttataagcacaaagcacttacatagttataaattaataaaatcctatattaaaagtcaaaaaatattttatttagagacctctataaattaaaaggttgactattttttagagcaaaagttaatctaaattgacagcatcttagaagagttatattaattatattaatattcttacaccacttttgataacattgttgatgtatctctttttattatatcatatcattcaacatatttcacttatctcttttctccttattgtctttctctgatcattatagaatcttttgcatagttttgatgtaaaaagataatttctcaattgagattaataaaagactgtgtcaatgggattgcgtcatcatgttgaagacatgtatatatacacaaatgtaaataatcatccaatgaaggcttttaccacagaccagaacgtgaggatctacctaaaagaatttgtattaaaaagttagcacttttcagtttttttttttttttnnnnnnnnnnnnnnnnnnnnnnnnnnnnnnnnnnnnnnnnnnnnnnnnnnnnnnnnnnnnnnnnnnnnnnnnnnnnnnnnnnnnnnnnnnnnnnnnnnnnnnnnnnnnnnnnnnnnnnnnnnnnnnnnnnnnnnnnnnnnnnnnnnnnnnnnnnnnnnnnnnnnnnnnnnnnnnnnnnnnnnnnnnnnnnnnnnnnnnnnnnnnnnnnnnnnnnnnnnnnnnnnnnnnnnnnnnnnnnnnnnnnnnnnnnnnnnnnnnnnnnnnnnnnnnnnnnnnnnnnnnnnnnnnnnnnnnnnnnnnnnnnnnnnnnnnnnnnnnnnnnnnnnnnnnnnnnnnnnnnnnnnnnnnnnnnnnnnnnnnnnnnnnnnnnnnnnnnnnnnnnnnnnnnnnnnnnnnnnnnnnnnnnnnnnnnnnnnnnnnnnnnnnnnnnnnnnnnnnnnnnnnnnnnnnnnnnnnnnnnnnnnnnnnnnnnnnnnnnnnnnnnnnnnnnnnnnnnnnnnnnnnnnnnnnnnnnnnnnnnnnnnnnnnnnnnnnnnnnnnnnnnnnnnnnnnnnnnnnnnnnnnnnnnnnnnnnnnnnnnnnnnnnnnnnnnnnnnnnnnnnnnnnnnnnnnnnnnnnnnnnnnnnnnnnnnnnnnnnnnnnnnnnnnnnnnnnnnnnnnnnnnnnnnnnnnnnnnnnnnnnnnnnnnnnnnnnnnnnnnnnnnnnnnnnnnnnnnnnnnnnnnnnnnnnnnntttttacataaactagcatacatgcacacatgacataatgtcacaagttaactgtatgaatctttattcacatgggttcaagttccctggcccagccaaggacaaattgggaaaactatttatatggaagaaggtgcactttttaggttgtcaaattgatagtatgatgcagaaaatgttacgtataatttatggccaacttttggacgtctctgtttctaaaaattgttgccattagccactgcagcatgccgaagatgtgaatttcagtttaattctttcctcatctgataaataataacaaactggcttcttaattagtacaataaactgtatttttaatactttaagaaatggtaaaactgttaataatgtgtttagatttccctttaaaacaattaaagtcataattcgagtgaaaacttaaacaaagcaaaacaaaacttatgttcaaatcatgatatatggaaacattacacataccaagagtgtgtttgattgcgtgtcaggagagaaaatatccgttattgaatgtgaaaatcaaaagcaacagacaccaatcactcactaaaatactaattcgccaattgcatcatggggattgaactgtgttaagatattctacatgttcaaatgaaagagggaattgattcaatcgagattcatgataactttttagcaggatttgttgccgatgaactctgcaaatcattaacaagtaaacacgaattatttgctataacctttcgctgttactttatctgctggaagctggctttttcttttctaacggccactttgaaagcttctcttcccattgacacttttgattttttttttnnnnnnnnnnnnnnnnnnnnnnnnnnnnnnnnnnnnnnnnnnnnnnnnnnnnnnnnnnnnnnnnnnnnnnnnnnnnnnnnnnnnnnnnnnnnnnnnnnnnnnnnnnnnnnnnnnnnnnnnnnnnnnnnnnnnnnnnnnnnnnnaaaaatcacagcaaaaatttaatttctcatttgtaaattatagaacactgtgtcaagaggattatgtcatcatgttgaagactattaaaatgtaaataatcatctcatgaaggctttttttaagagactgtgtatttttttagcaaagttaattttgtttaagttgataaagtaataatccttctaaatatttaatattaacaacatactgacatgaatttaaaattactagttaaattaaaaccatttcatttcaatgaatctaggcgatgagaaagatctatatctaatatgtaatgtaacaaagttcccattaaaaaaatgtatgaaaaagttggcacatttttcacataaaatagcatagatttatacataacataatgtcacaagttaactatgaatctttactcacatggattcaagtacccgtgcggccgtgcccagccgagaacataatgggaaaaatcttatataaaagaaagtgcacttttggttgtcaaattgctagtatgatgcagagaatgtcatgtatgatttttggccaacttttggacgtctttgtttataaattttgttttgtcataagctactgcaggaggccgaagatgaggatttcagttttgttcttccctcacctaataaataataacaaactggtttcttttttggtacaataaactattttaatactctttctcctcatttttacattactcaattaattaacttataatgatgaaggaaattaatttagtaagttagtcgtattgattttttcttaaatttatacattttaaaattttctctaacatttcaatcatacatacttttgtttatttatataaaaaagaatcagagaaaatactttaagaaatgataaaacaattaatgtgtttggattttacttgaaaaacttaaagtcataatttcagtgaaaaaattaaaaacaataataataaaaacagaaaaacaaacaatattttttgctcaaatcatgatatgtggggcattgcactctccaactcgtcaattgcatccgttggattgaactgggttcggatattctacatgttcattgtataaaatgaaataggtaattgatgcaatcgagattcgtagttactttttagcagtatttgtggaaaatgaactctgcaaatcattaaaattgcaaacagaaactattcgctattaattagtctattacctttcactgttaccttatattatgggagttggcttttctttttatggccgttaggcaagtttgaaagctccccattccattgactttgtctccctagccatttgtacaggcacagcaaccaattattcaattcatgattctttaacctattttttatttatttataaatgtaaaaaatacgagttttttgacaagaaaaataataaagttacataaagctggttagaagtaaataattttgcataaaaaataatatttgtattagaaattattatttgaactaggagattgagagaaattggtgaaacgtaaggataacaatgagtttatttctaatgctgttgtagtgtgaatgtgaatatgaacttctatgttgggtcagagtagacaaatttagtaatatataaatgagaatgattcacaaatttattcttttaatgtggtgttgattttatttgtgtactacctccttattatatcttttaattttttaatttttttcaatatatnnnnnnnnnnnnnnnnnnnnnnnnnnnnnnnnnnnnnnnnnnnnnnnnnnnnnnnnnnnnnnnnnnnnnnnnnnnnnnnnnnnnnnnnnnnnnnnnnnnnnnnnnnnnnnnnnnnnnnnnnnnnnnnnnnnnnnnnnnnnnnnnnnnnnnnnnnnnnnnnnnnnnnnnnnnnnnnnnnnnnnnnnnnnnnnnnnnnnnnnnnnnnnnnnnnnnnnnnnnnnnnnnnnnnnnnnnnnnnnnnnnnnnnnnnnnnnnnnnnnnnnnnnnnnnnnnnnnnnnnnnnnnnnnnnnnnnnnnnnnnnnnnnnnnnnnnnnnnnnnnnnnnnnnnnnnnnnnnnnnnnnnnnnnnnnnnnnnnnnnnnnnnnnnnnnnnnnnnnnnnnnnnnnnnnnnnnnnnnnnnnnnnnnnnnnnnnnnnnnnnnnnnnnnnnnnnnnnnnnnnnnnnnnnnnnnnnnnnnnnnnnnnnnnnnnnnnnnnnnnnnnnnnnnnnnnnnnnnnnnnnnnnnnnnnnnnnnnnnnnnnnnnnnnnnnnnnnnnnnnnnnnnnnnnnnnnnnnnnnnnnnnnnnnnnnnnnnnnnnnnnnnnnnnnnnnnnnnnnnnnnnnnnnnnnnnnnnnnnnnnnnnnnnnnnnnnnnnnnnnnnnnnnnnnnnnnnnnnnnnnnnnnnnnnnnnnnnnnnnnnnnnnnnnnnnnnnnnnnnnnnnnnnnnnnnnnnnnnnnnnnnnnnnnnnnnnnnnnnnnnnnnnnnnnnnnnnnnnnnnnnnnnnnnnnnnnnnnnnnnnnnnnnnnnnnnnnnnnnnnnnnnnnnnnnnnnnnnnnnnnnnnnnnnnnnnnnnnnnnnnnnnnnnnnnnnnnnnnnnnnnnnnnnnnnnnnnnnnnnnnnnnnnnnnnnnnnnnnnnnnnnnnnnnnnnnnnnnnnnnnnnnnnnnnnnnnnnnnnnnnnnnnnnnnnnnnnnnnnnnnnnnnnnnnnnnnnnnnnnnnnnnnnnnnnnnnnnnnnnnnnnnnnnnnnnnnnnnnnnnnnnnnnnnnnnnnnnnnnnnnnnnnnnnnnnnnnnnnnnnnnnnnnnnnnnnnnnnnnnnnnnnnnnnnnnnnnnnnnnnnnnnnnnnnnnnnnnnnnnnnnnnnnnnnnnnnnnnnnnnnnnnnnnnnnnnnnnnnnnnnnnnnnnnnntataaataacaatttttcaagtgcattctaatgccaactttttacttctcataaccacactataataataaaaattgccccaagtataacatgaagcaacagtttttataacacctaaaatatattatagctaagaatcaaatatatgtcatcacaaatactttatacattgttaactattatatatttcctaagaaaaataaattacctaaggaaaaaaacagtaatgtgtaattgtaaagtctccatgctattgcttttgagctattcgttatggaaatcatttttcattttaaaatttcagcaacactgcatgtgatcagcacttagtttttatctcacagaaaccctactcacttcttttcttggatgaaaaaggttccaagttctgaattaggtcccacggtgatgactcacccacccttccaaacaaagctaaatatactgaatggtaggtacactaccctataaccatgagctgcaactttactttataagcaattagtcaattagaggatactctaggtcacctaaattgagaaaatagtctcaccctaagcgtgatttaataacattagtcaaggacgggattaaattttaataaaggtttactttttattattcttaaacatagtttttttatgttatacttcaattaaattttcttccaaagtgaaatgctgcaagttaatatttctttcatataatccttctgaacaaaattttaataggacgcccatgtgatgcagtggaagaaaaaggtacttcaaatataacgaaacctgaagaacaatgatcactttagaaatcacaaaagataaagtctactgcaaagtataaaaaaccttagatacaatttactttagtgcccaaagttaaattaatgtagttactagctaccccattaccagttcacaccaactggaagaaaagtcaacattattaactaacataatccataaccccaaaaaatcttcaaactaatataaaccaactagtaatttatcttctcttcctagtctcacttccagacaacttcccataacatactttacacaaagcaatcagccagatgcatattctcatgcgggaatatctctaccctcttcagcttttagtatccagtaggaaactcgcagctaccataccctgcaaaataacaactttggttaattatgctcacatccacatatccataatttcaactaaaaaaaaaacaataaagtacaattattacaaatttttattaggtttgcgtccatttcccttgtccctttgggtataaggttttcgccaacattgtgctaaacaaaaaagcattttttttcatagaccaagtaaaacaacactgtagcatcgtaattagaatggacccctatagtacactctacccaataaagttacgccacgtcgttatcataaaagattcccctttgtttttatgtccactgacctgtcgtgcaccactcttctcaccccgctcaagttagcagcgcaacataacactattctaaactacacacaatcagaagataaaaaagtaaaagacttaaatatgatttttcatatatgtaatatgtaatattcttcttttctaatttattgcctaaaaaacatttttatttattttacaatctaacaatttttaaacttttatttttagtatttgctgatagttagtttacgtgacacacttgccacattttcacctaacaaataatttggcattctgttaatttatttagtaataaactgaaaaagaaaaattcatgtatcaaaacatatttaaggcaaaataaaaatataaggggtttatagaatactcactaggttcctgcgtgaccacgtacgacgtacccccaaaatagcagctaccaccctttcgcgactgtttctggtaataactgttgaacgcgaacgaagcgtgggccacaagcgtgttaggatcgtaacacgtggcaccgcgctgaatcggaccgcaatcagcacctccctcgccgcaagcgaaatctagagccgcctgcagcttaaccttatccgcgtcccggttcgccacgcaccatgtgttcccagtggtactcttggaaaccccgccgctcacaacgggcgccggcgccggcgtctccttctgctgtccgccgcctctcaccggcgccgacggacggtcgtggtagtccttgagctcctccaccgttaacggaacattgtaaacccccctctcgtcagggtaaaaaagcccaaagtttctctcggaagtgggcccgggcttctggttctcattaaaaagcgcgaagagataaacggtgagatccgctttgggcctgaggggggtcccaccagcggtcaagatcttacgaacaagattcccgttgtacgctgcagcgttctctaggctggcacccacctcattactatcccccttagaaggccaacctgtttcagtaaccacgatcttaacgtcgtcgtatttcaaagcacttagcgcagagaaaacggcgtctatttgggcgtcaaataggttataatatctcaacccgttacccggatccaccactccggggttatcacggaacagcgcgtagtccaaagagatgacatcagcgttcgactcatacgcgaaaaacgggtacacgttaaccattaggtatgacccggtttcgcggagaaagtccagcatgggcttgaaaacgggttccacgagttcgggtcggaacgacccggcagaggaagggtaggagtttgcaagcgcggagagtgcaatgggagaggaaaccttaatgtccttgtcgaggttgtgcttagtgagggctttttggatgttcttcatggcgggtacgaggaacttggttgtgttgtgtgggtccacgaaaacctcgttgccgaccgcaatggattcgatttgcgtgtgagggtagtacgcggcgacgttcctttcgacccatgaggatgcaaaggagggagctttggcggctgcgaaaagttgctggttcggaagatcaaccgtcactttgattccggatccggatagtgcccggagcactgccgggtcggtgtcgtaaactttgacacgtgtcagtccttgggatttgaggagttgaacgaccttcagcgcggaggggaggttgttcgctatgcgaccgtagttaactccaatggaacctccatctgaatcaaacaaacaaacaatgtaggataaaagggttaactttgttatgcaaaaacaatgtagaataaaagggttgactttattatgcaaaaatgaaagaagagaaagagagaaatgaagtggtagaggtgagcattacctgcgagtgcgagggaaaggagaatggtgaggatgatgaagcgatgcattctctgcttctgtggggagaaacagagcgagagagagagggtttgggtttgttttgttgttgacgatgtttctgggaatgtggtgtgcagagagtgtttgtttgtgtggagcaagtgggtgacgtgagagagagtggtgtctgtttgttactatgtatgaagggaagggtgttgaggtaaacatggtggtgggaaagggtaagagggaaagtgggacccaccatccatcactcatggccggccttatgctgctgatgaagttcaggaactggagggatgagcgtttcgtcccaccaaaaagggccttagatcgggatttcaatgtttttattattaaattcataagaggaatgattattgattagtataaggtgatcataagtatattaatttttaaaataatttattattaaataatagtataaaattgttttatattatatataggtatgaaattctaaatttattttttaaaattatatgattatggacactttttgtggtgcatgaattatgattttcggtaggattttgtttttcttttaatgaagaaaaatccgaaaaaaaggccaatttaagaatcagaatgaaaactgactatggcattttattcattgctgtatttaagttctcgacatcacagggaataatgttttgaaggagctgctatcatccgttaatgataaagataaattaaaaaatggtcatactaatttcgtgtacttttttgaactaatggtaaaattcaattttacttcattgtcttgtcagatcttctttgcttttttttttacctttctgaacagcatcttacatattacaccaaagttgggtgtcttacaaatggttttgtatcttcgcttttgcacctaaataatccgtaaagataattaatctaatcgagcctttgcggatgagggtcgaatgtgtagcacattgttccttgggacacaaggtctaacttgtttgccaattattttcttggtaacgtatgagtaaagagtaattaatgactccaatggacatcatttatgtcaatccaaaaataccaataaaattttacttcaaaccttacaacatattcctttaacaggttttttcttttcttttttagtaaattacacatttttcatataatatttagaaaaaatataagtatcatatttttaaaaaaattgtacacatattttttctaagatttaaggaaattatatgtttgtcatgagattttaaaaaattatataaaaatatcttttatttttaaaatctacacaaactctcctaataagtatagattttgatgtactcgaagttagttttgaacaagaactaataaatttaaattttacaagttacaaaaaatagataattttttttcagcgatgaatttcaaacatttttattttatgatgacgaaatatttatttttaatttattttaattaaaattgtcaacgcataagacttttaattgtcaaatatttagatgatatttagggaatttgtataggtcttaaaaatagaagagagatatatataattttcttaaaattttaggagaggcacatataggttttatataattttttaaaattttaaaactttttaaaattttaagatatataattttttaaaattttagagaaaaatatatataattttttttcttttattaaaagcaagatatctcaatagcagaaaatcataaaatgattttttatatgcacgatgagtaaattgaatctcttttagtatacttgaagaaacaagctttttccttcttttatgtaagaaaaaatggagatcaactttcattcagtgcatctttaaataaaatactacctaagtgtcgaacaagcaaagcccacaacttctcagatgttgtttgcaatctctcatcctcctcaaggttcacttcgttttcttcttattttcatgaaaaatcaagactaaaacttagtgacaatttatcaaaaggctaaatgacaacttcctaatcctaaatgacaaattattaacaaaatcaaggccaaacaagtgtcaaaagaaaggaaaggataagataagtgtcaaattgtaagataaaattggcacgtatcaatactcaagtcagccttagaggccttgggtcactgatttacatgattcatttcttgggcttgagcttctcaagtatcaaaggtccatcttttttttttttctctctctttctttggatcggtagaagttgttatgacatttggactctaataccatattgggttcaaccctttacctggacaacttatacttcttcctaagcttatactcaagtcagtctcgacctcatattttgagtgcttcttcatacaccaggccaaatttctcctacaccattttttttataaaaacccgaaaatacccatgctttgatttggacacaaataaatgagatggtgaacagctgagcttcatttgcattgcgacatccgtatggctttcgagaaaaatatatgagcttgggcaacatccatataggttcattgcaacaacattggtgtttattggtggcgtttcattcatttcgggggcttgttcgtggttgccggagttgcagagctgtcggcgaagaaaaaagaggtgagtagggggcgttgtttttttacggattcggtaatccgtattatttatacggattacctaatccgtatgaattagacggattagcagatccgtataatctatacggattannnnnnnnnnnnnnnnnnnnnnnnnnnnnnnnnnnnnnnnnnnnnnnnnnnnnnnnnnnnnnnnnnnnnnnnnnnnnnnnnnnnnnnnnnnnnnnnnnnnnnnnnnnnnnnnnnnnnnnnnnnnnnnnnnnnnnnnnnnnnnnnnnnnnnnnnnnnnnnnnnnnnnnnnnnnnnnnnnnnnnnnnnnnnnnnnnnnnnnnnnnnnnnnnnnnnnnnnnnnnnnnnnnnnnnnnnnnnnnnnnnnnnnnnnnnnnnnnnnnnnnnnnnnnnnnnnnnnnnnnnnnnnnnnnnnnnnnnnnnnnnnnnnnnnnnnnnnnnnnnnnnnnnnnnnnnnnnnnnnnnnnnnnnnnnnnnnnnnnnnnnnnnnnnnnnnnnnnnnnnnnnnnnnnnnnnnnnnnnnnnnnnnnnnnnnnnnnnnnnnnnnnnnnnnnnnnnnnnnnnnnnnnnnnnnnnnnnnnnnnnnnnnnnnnnnnnnnnnnnnnnnnnnnnnnnnnnnnnnnnnnnnnnnnnnnnnnnnnnnnnnnnnnnnnnnnnnnnnnnnnnnnnnnnnnnnnnnnnnnnnnnnnnnnnnnnnnnnnnnnnnnnnnnnnnnnnnnnnnnnnnnnnnnnnnnnnnnnnnnnnnnnnnnnnnnnnnnnnnnnnnnnnnnnnnnnnnnnnnnnnnnnnnnnnnnnnnnnnnnnnnnnnnnnnnnnnnnnnnnnnnnnnnnnnnnnnnnnnnnnnnnnnnnnnnnnnnnnnnnnnnnnnnnnnnnnnnnnnnnnnnnnnnnnnnnnnnnnnnnnnnnnnnnnnnnnnnnnnnnnnnnnnnnnnnnnnnnnnnnnnnnnnnnnnnnnnnnnnnnnnnnnnnnnnnnnnnnnnnnnnnnnnnnnnnnnnnnnnnnnnnnnnnnnnnnnnnnnnnnnnnnnnnnnnnnnnnnnnnnnnnnnnnnnnnnnnnnnnnnnnnnnnnnnnnnnnnnnnnnnnnnnnnnnnnnnnnnnnnnnnnnnnnnnnnnnnnnnnnnnnnnnnnnnnnnnnnnnnnnnnnnnnnnnnnnnnnnnnnnnnnnnnnnnnnnnnnnnnnnnnnnnnnnnnnnnnnnnnnnnnnnnnnnnnnnnnnnnnnnnnnnnnnnnnnnnnnnnnnnnnnnnnnnnnnnnnnnnnnnnnnnnnnnnnnnnnnnnnnnnnnnnnnnnnnnnnnnnnnnnnnnnnnnnnnnnnnnnnnnnnnnnnnnnnnnnnnnnnnnnnnnnnnnnnnnnnnnnnnnnnnnnnnnnnnnnnnnnnnnnnnnnnnnnnnnnnnnnnnnnnnnnnnnnnnnnnnnnnnnnnnnnnnnnnnnnnnnnnnnnnnnnnnnnnnnnnnnnnnnnnnnnnnnnnnnnnnnnnnnnnnnnnnnnnnnnnnnnnnnnnnnnnnnnnnnnnnnnnnnnnnnnnnnnnnnnnnnnnnnnnnnnnnnnnnnnnnnnnnnnnnnnnnnnnnnnnnnnnnnnnnnnnnnnnnnnnnnnnnnnnnnnnnnnnnnnnnnnnnnnnnnnnnnnnnnnnnnnnnnnnnnnnnnnnnnnnnnnnnnnnnnnnnnnnnnnnnnnnnnnnnnnnnnnnnnnnnnnnnnnnnnnnnnnnnnnnnnnnnnnnnnnnnnnnnnnnnnnnnnnnnnnnnnnnnnnnnnnnnnnnnnnnnnnnnnnnnnnnnnnnnnnnnnnnnnnnnnnnnnnnnnnnnnnnnnnnnnnnnnnnnnnnnnnnnnnnnnnnnnnnnnnnnnnnnnnnnnnnnnnnnnnnnnnnnnnnnnnnnnnnnnnnnnnnnnnnnnnnnnnnnnnnnnnnnnnnnnnnnnnnnnnnnnnnnnnnnnnnnnnnnnnnnnnnnnnnnnnnnnnnnnnnnnnnnnnnnnnnnnnnnnnnnnnnnnnnnnnnnnnnnnnnnnnnnnnnnnnnnnnnnnnnnnnnnnnnnnnnnnnnnnnnnnnnnnnnnnnnnnnnnnnnnnnnnnnnnnnnnnnnnnnnnnnnnnnnnnnnnnnnnnnnnnnnnnnnnnnnnnnnnnnnnnnnnnnnnnnnnnnnnnnnnnnnnnnnnnnnnnnnnnnnnnnnnnnnnnnnnnnnnnnnnnnnnnnnnnnnnnnnnnnnnnnnnnnnnnnnnnnnnnnnnnnnnnnnnnnnnnnnnnnnnnnnnnnnnnnnnnnnnnnnnnnnnnnnnnnnnnnnnnnnnnnnnnnnnnnnnnnnnnnnnnnnnnnnnnnnnnnnnnnnnnnnnnnnnnnnnnnnnnnnnnnnnnnnnnnnnnnnnnnnnnattatggtgaagaatcttgggctttggttcgcaatcatttgctcagagaacttggagagtggacggatggatatattgccttgtttggtggcatagatagatttgaaaccttaaagcggtccctactggttgatggattgtcgaaggtaaacctttcatttgtttattcaatgtatgnnnnnnnnnnnnnnnnnnnnnnnnnnnnnnnnnnnnnnnnnnnnnnnnnnnnnnnnnnnnnnnnnnnnnnnnnnnnnnnctttaattcaagtaaacatatatttgaatcattaaactgtatttacagtgtactatagacaagtggatggatattacagacatgggtcatgtaattgcatcgagatataatgtgattgtggtttccctttcactgaagcaaagcatgacgtttttccctctaagaagtcaaccgcctagagatccacacgttcatcgcattttgtgcattggccatgtttttgggaaccactttgtgcaggtaatcctttaatttgtttattttatgaaagggacatcattaaggacacaaataaacgttactgatgttgtgtaattttgttatgtgtaacaggtttttttaaaagacaattgtccattaccgttgactacatttttgtgggataggcattgtaccagtgaagcaaaacattggcctagttattacattagtagaatgcaaatgtatgctaactgtatgaagttacgcactgaacatgtagatttacggtaatgtgtatcaacgtttcaaaagtgatgaatgacattgttttctgcataactgtgtccaaatttgtccaacatgagaaacatcataaaaaacaagctaataaataagtgtatacaaaagtcaaataaaaatcaaaggcgcctccgttgtgcatctcgtggacgtcttcctcgagtataaacaatcccgtggtccctgacactacgggcaacaagcaacatctgtagcgtcctatcatatgcctcggtgccctctgtaacaatcccatcatcaatgaaggcttgcaagccctcannnnnnnnnnnnnnnnnnnnnnnnnnnnnnnnnnnnnnnnnnnnnnnnnnnnnnnnnnnnnnnnnnnnnnnnnnnnnnnnnnnnnnnnnnnnnnnnnnnnnnnnnnnnnnnnnnnnnnnnnnnnnnnnnnnnnnnnnnnnnnnnnnnnnnnnnnnnnnnnnnnnnnnnnnnnncaagtcgttgacaaacaacctgtatttacagtgacaaatacaaacataagcagaatggattcaagtattatcgcacaatgcgcaaaacatgtagattttcttaccactgcatgccttggagactggtgctcctgagccacatctgatgcatcgggaggaactggatcagtagaaggcggctggacagatgccggtgcaaaaggaactggaacagtctggggcccagatggaatatgggatcgggcctgagcatactgcgtcggagtcataaatgggtgtgagattcggaagaaccactccaaatatccaggcacacagtgactaggataatgaaccaagtcaccggtcgatataaggaactccgcgaagtggacccatcggtcgtccacatcgtctgcggagggaacttctgacaaaggcagctcaggaatgtgttgaatctggccaaactgccgaacgaccctgtcaggtaagtacctcacgatgtggggaccccatctgatgaacccggaaaataagctaatcggctcgaactccctaaatggacgatgggcatcgtatgctgtccagcatatgtcatctggcctcaaccggtcgatgcgagcacgataagtcgacaacggtaatgccttcgcactcttccagcgaaaggcacgtggcaaggtctcctcgtacgtatcctccgccgtcccgttgcctacagtcggaaaatgctcgtatatccagcactacaagtttaaatcattatagtcagaagtagtaaaaaaacataacaatttttattaacacagacacatgtatgcaagattacctgtaacaaagtaatgtatccagctagatgcttgccgtggtgttttgatgcataaccgagatgctcatacatatgcaccaaagcaccggccccccaagcaaatcccccagcttcgtccaggtcacgaaaaggttgtaagaactgaacgcctatatgtgtcgcactcttgttggcaaacaaagtgcaaccaacaagatgcaacagatatgccctcgctgcaactatccacttgccagagtcacacatactaaaatacaactctcgaagccaggacaatcgcacataagcgccgtggcactgtgtcgtctccgcttcagcgtcatcaacactgacctctagcagctcgaccaacaatgtgatcgcctctccgatatcaatctggtcgtagtcgtggaagactcccatgacagggatatgtagaagagaggcaacatcgtccaacgtaatggtcaactcaccgactggcagatgaaagctggatgtctcagcatgccatctctctacaaaggctgaaagcaatcctcgatctccagtctcgactgagcaacgaatcaatggactaaggccagtagcagccactaagccctcaatctccggagctggcttcccgaatttaatgaccttacgtccatgggaagccaacttcagctctgcacgttcctgtaacaaatacattcacagatgtttacaattaaccacacagatgtttacaatttacaattaagcaagggtcattgttttataaatacctctcctgaccagactttaaaagccacatggtcggcataggcagtcaagactgaacagtcttccggacctcctggaaaacctccagtccctacatcgtccgtcggaagtatatcagcatcaatatgtggttcctcaactggagcatcgtcacgtggaggatcgtcacgtggaggatcctgaggaacactaacacctgcccgttgtcgacgaacggatgctgtcggtctacgccgctcatccgctccaccaacaggcctatgcattcctcctctggtcctagccatgatctgtacaacatcacataaatagttgcgttaaaattgtaagacaaattctaaccacaaagtccaaaactgggacacacaagtcaaattcacaagcacacagtccaatgaagtcaagttcaaaccaaacagtccaatcctgggtgacacaagtccaattcacaagcacagtgcgcaatcaagtcaagttcaaaccaaacagtccaaaactgggtaacacaagtccaattcacaagcatagtgagcaatcaagtcaaatactaacgacacagtccaaaactgggtaacacaagtccagttgacaagcacagtgagcaatcaagtcaacttcaaaccaaacagtccaaaactgggtaacacaattccaattcacaagcatagtgagcaatgaagtcaagttcaaaccaaacatcccaaaactaggtaacacaagtccaattgacaagcatagtgagcaatcaagtcaaattctaaccacacagtccaaaactggtacacacaagtcaaattcagaagcacacagtccaatgaagtcaagttcaaaccaaacactccaatactgggtaacacaagtccaattgacaagcatagtgagcaatcaagtcaaatactaaccacactgtccaaaacttagtcacacaagtcaaattcaagacaaacagtccaagaccgggtgacacaagtccaatacacaaccatagtgacctaccaaatccaattctaaccaaacagcaaatgcataccgggtgacaaaagttcaattcacaagcacgtcatcaatcaaggcaaattcaaacgcacagacaactaccaagtccaattcagaagcacagtcacctatcaagtccaattcacaagcatcgtcacctatcaagtccaattcaattgctaactatatacaactttcattgacaaccatacttcctatatttgagagttatttgatcaatagcatacaatcaatagcatatcatcatgaagatgttgataacaattgaaaattcaggtgtaatcatttaaaaaattttttttttttaaaaaaaggcgccatacggattgctcaatccgaatgaaccatacggattggctaatccgtatgtgtcattcggattggctaatccgtatgtgtcattcggattggctaatccgtatgttttatacggattgctcaatccgaatgacccatacggattagccaatccgaatgacacatacggattagataatccgtatggttcattcggattgagcaatccgtatatcacatacggattacctaatccatatgtggtatacggattgctcaatccgaatgacccatacggattaccgaatccgtatggcgcttcccctcccaaaaacgcccaaaatgaagaaactcaccttcgactgcgccttcaccaacaccctaccaagtcaccgagcaccacggccaaaaatgcggaaccaccgaagctttggaatcaacaaccaccgagaatcaccacagcaaggagaagaagaagcagacgcgcggaggaggaagagggaatgcgattttcttttaatttaaattaaaggggtaaaaccggaagtacactgtgcattactggtgtaggagaaatttggcctggtgtatgaagcgtcactctcatattttttgctttctctctttctttgtctgttgcttgggcttgtgattcttgagtctcgaaggcctatgtgtttttttaatatatattttttgggtcgatgcaatgggctactacatgatttaggctctgataacaagtaggaattttcgcacagacccaaaattaagttagtgtggactaggttgaattcatatgaaacataagaatgtatcgtccaaaaaattcaaaccaattcgactatgtcctctatgcttatatacactaacgtttgtctttatttgctcaatggaactttttaaagttaccatgtttacattgtagaatttaagatatctaaaagccaggtcaaagtgtttatcagcacaagaataaatgaaatataaaagtcaagaacaaggctataaagtgatgttgtcattcagaacacttgtactttagagacatgattaaatcaaacctatttcagtttatgggctgttccattttgattacccaaaaaatgtatccaccaccaccacgcgcacaaattatcaaacccattggtcgtttaaattttagtaataaggaaaaaaagctgagaattgaaaagtgcctaaaaaaatctagtaatgagtgattgccatgcataaaaaccacaatagtagatcataaaactaaaaaaataatataaaaaagaagatatatcaaacaatacaggataatcgtttcccaccctttcattccttttgcttttgaaaacattattaaaatatacacaataggaaaaaaaatacaactcatagtaccacttgaaaaaaattatttttcatcaaatttagatgtacgaaaatgacattaactaaaaacaaattaagaaaatgaaaacaaaaaatgtaacacacattggtattttgggctatataagtcgaacacgttgtcaagcaatggtgggcctgtctaatagaccttacgaaatgtttggtgcaaataacaacattgtggttggtccatcattttcaagaaaattaatttaccttatttaaagtaaaaaaaaaaattgtttgcttttgcatatcaaatggcaaaaaaatcttcatatttcccggaagatgaattattacgagctatacttgatatatatacttggtatatgcaagtttcaaatgagcatttcataaatcggttatatttatttaatattatttaggttaatagttgagtttaactttgatatattattagtgtaaaaaattatgttatatatatcaaaatgagaaataagtttgtatcatatataataatttttccaatttcctttcttccttataattcaaaatctaaataatttataatcatgagatacataccaaaacaaattcattattcataccatatataataaacatttaaattttaattaaaccttagtgataatataatttttcaataaattgaagggagaaagataaaagaaaaaataattgaagtatgatgaaaaatgttacggatgtatctcggacaaaacaaaaaaataaaaggcccattttccaatatatgcataggcacagccaggactacagccacccagaacagaacaacagttgaagatacatgatgtcattgtccatcttcaaacttgttttgacatcatttcttctctgctttttcttgcaggaacctaccaatgctcttagaaaggcaagtaagctttgcattttattagttccctgattgttttgtcgtcaatcttatggagttttgtaactgttcaagttccaactttgagaatttccctgattttatattttgttggattctgttttcagacctacattgtgtgcatgggaggacattctcatggtccagaccctttgtcttcatcagtataagtaacattgttgttacaatagatgtactagcagaaataaattttcttcatctcttttatcattttttagttattttattcaacaaaacacttttatttttcactttaaatcttactaattttcattcctttttttctatccactctatttctcttctctcagtcagcctaaaagataaaagaatatctatatactgataaaagataaaactaatattttcaggaaaaaaaatataaaattatataattttgtggtattttatgtttaatcttgctttcctttttttttctctctcctataattctttcaggaatcaagccttagtgcaacaccgtttcttagtttttgtcggtcacaatctctttccatgtgataaattcgtgtcccctcctactactttttcctggtttcgttccttgccaccgctacacaagtatgaacaaaagtaataatgggttgaaaataactaatcgaaatagttaaaaaaatataaaataatataaaaataataattataatttatttaaaaagtaattaaaaattaaataaatatattgaatataannnnnnnnnnnnnnnnnnnnnnnnnnnnnnnnnnnnnnnnnnnnnnnnnnnnnnnnnnnnnnnnnnnnnnnnnnnnnnnnnnnnnnnnnnnnnnnnnnnnnnnnnnnnnnnnnnnnnnnnnnnnnnnnnnnnnnnnnnnnnnnnnnnnnnnnnnnnnnnnnnnnnnnnnnnnnnnnnnnnnnnnnnnnnnnnnnnnnnnnnnnnnnnnnnnnnnnnnnnnnnnnnnnnnnnnnnnnnnnnnnnnnnnnnnnnnncttatcaaatataacgaaagcttcattaaaaattgaaaagtcaatttattaaattataaatgttcgataaaattagttgttgaaataattgaaaaatataaattataaaaataataaaattattatttattaaaagataaaaaattaaataaatatattgcggataaaaatgaaaaaaatataaaaaaaaattgaaactaaaaactagtttaaatatctgttatccattttccaatataagcataggcatagcctagactatagccacccctgaacagaaaaacagttgaagatacatgatgtcattgtccatcttcaaacttgttttgacatcatttctactctgctttttcttgcaggaacctaccaatgctcttagaaaggcaagtaagctttgcattttattagttcctgattgttttctcgtcaatcttatggagttttgtaactgttcaagttccaactttgagaatttgcctgattttatattttgttggattctgttttcagacctacattgtgtacatgggaggacattctcatggtccagaccctttgcctagtgatcttgaaacagccacaaattcccatcatgatttactcgcttcttacttaggaaggtaaaacaaatgttaatttctgttaaatattattaggacgtacgtgtgttaattaaaatttgataattcatcagtcatgagaaggccaaggaagcaattatgtactcgtacaataagcacatcaatggctatgctgccctacttgaaaaggaagaagcatcacagattgcaagtgagcaaagattatgggcctgtttggataagtttctttaaaaatacttctagaagaagaaaataataacaaaaagatgagatgcgcttcttcataagtaaaaataaactctctattaattaatttgtagaagctcatcaatgtagcttctctaaaatatgagatgacatctacaaattaattaataaagagtttatttttacttatgaaaaatctcatttcatttttttctccttatttttctcttctagaagtgcttctagagaagttaacatccaaacagaccctattaccatgaccatgaccatgattttgtactcatcttgaagcctcacaaattgatataatgtattatatgtttgtatgggttcagaaaacccaaatgtagtttctgttttcttgagcaaagaacacaaattgcatacaaccaggacatgggaatttcttggactggaaaaaaatggaaatattcctgcaaactctgcttggaggaaagcaagatttggagaaaatataatcatcgctaatatcgatacaggtctgcttaatgcttacttaaaatttattagggattataaatttataattgaaatctggtaaataagaaataaatctcacataatttgatgattcagcgttatcaaataatttattttaaaatttattaaaacatattatcaatatttttcttcaatacaacaaaaaaagtaaatatatgtaaatcatttttatatttttatctaatcactaatttactatgaatattaaatttgttgatttttatataattacttaaaaaattataacgatattttttttattaattgacactgtacaataacattctatagaaattaaattaagaatagaaacgcatcttttcaattctctgtttcaatcgtcactatcatttggttttctgttattgtttaagactttcatttctctttgactatatatatgtgtatatatatgtgtgtgtgtgagtttttatttcttatgaatatatacaggtaaaaaaaattattctttataaatttaataaattttgaaaacaattttgttccatacttgctaacttttttccaaacatctctctatgaagtgaaaataattataaaatttaaattattaaagtaattgcataaatataaatttgagagactatctgtcttaattaaaatttattttaaattcattcacactaactttgagctgaaagtttgaattagtgattcattatgatatctattcgatcggactgaatcaaggacaattttgggtttttctcaacaaagttgaatatttagcttaatatctctcactaatttaattaagtagtttagatttatagtgtccccataaatttgtactacaaacatattttcctttttgtaaatacgttagttgcttctaaacaggagtttggcccgaacaccctagtttccgtgacaaaggatatgggcctgtcccttcaaagtggcgtgggaaaggtgtctgtgagatcgacacttataatggtttgtctacaaataaatgtttctgtaacaggtaaattttctttcttatttcaattcgtaaattggggttgaagttgaactaccctatagacacataataaattacgagccaggcgatattctatttactgaaatatataaccttaggtaattaaatgtaatttataaaattaatactcaagttagtgtaaagatatataaattaaaggatcagatgaggctgcatacattatcattttatacagagaaaataaaaaattatttattattctatgtgcaatcattgcacaaatgttttattttatagtttaagcttagccaaaggacagatattgaatctgtgatgctgccatagccattaataaataatcctaagggaagaacaaggacaggaccagaaccagaaccggcccgaaacttccctgttcagattgtttcttatggattcgtccatgccgattatagattgaagattcccttagggtagtttggttgctggagaagttaccatgatttttttttttttttaaatagtatggattccacaactttttttttatttaattttttttattaattttttttctctttcacataattaaacttatccttaataacacaaaaaaatacttcgataaaatatttttattatttttttaattttttattaattaaaaagtttatttaattgtttaataaatatatttttaattttttttaaatactactttattttttgaaatgttagtttataattttttttatcttgaatatatttatcaaattttctaatttctttattaaataaattatgatttattattttttatcattttatatttatcagttattcaacagttaattttactacttacttataatttaataagattaattttgaacttttagttactaacttttaatttttagtttttaattaatttttgaactagttttagtgaatataaccataataaaatttaaattttgcatatattatatttcaattaggttgagctaaggtttttaaaacggtatgattatcctttcaaaagaaaacggtgtgattatagagattcattggtgtagtcatgaaagtggttgaagagtaataattagtaaaatatttaaatatttttagttcttataatattttttcatccataaaaattaaatttagcactttctgtcgaatttcggagtcagtcgtagaggatatggcatgcagtaccatttgcagtggtattttgtccttattctaaaaaatatcatttttagaatgtagtaaatatattgttttcataattagtatactaaatccatgtaaattgtaattactgtaccaaaaaagggacctgtaattatttacattgaattatcattgaaaagagcctaacacatacggtgaaaatataattatgatgaatattcaggaagttgatcggagcaagaatttttctaaaaaatcgggaggccgaaggtgagaagattgacccaaggctgcgcagtggacgtgacttcgtagggcacggtacccacacactgtcaactgctggtggtaattttgttcgcggtgcaaatgttgaaggtaacggcaatggtactgctaagggaggctccccaaaagctcgtgttgtagcctacaaagcatgctggaataatctggacgtagaagggtgccatgaagcagacatgctacaagcatttgatcatgccatttatgatggtgttgatgtcatctcagcctctgtgggtgcgtctaatccctataaggaagctttgttaacagatgggatttccatagggtcactccatgcagtcgccaaaaacatagtggttgtttgctctgctggaaatgatggaccatcacctttaagtgtcacaaacgttgcaccctggtccttcaccgttgctgctagcaccatcgacagggaatttatcagcaacatttctctcggcaacaatcaatcctttacggtaagagatctaatctagagatttatttatttcatatttttatcatgtcaacttaatttgaccgtacttgtatcagggtgccagtcttaatcgaggtttaccaccatcatccccgtcgcaaaagttctattccgtgattaaatctgttgacgctaaacttcctaatgtgtccacggatgatgcgtaagcacagttttattttttatttcccaagcttgctcaaatatttatatatacttgtcttatacgtttcgtgtgtatatatatgtatgtatgttggtgtagccgtctttgcaaagcgggaacacttgatcctagaaaagtaaggggaaagatactaatctgccttcgaggcaataaattaacttcagctaaagaggtccaacagggtcatcttgctggcgctgtgtcagtttttgtgctaaatgataagggaagtggaaatttacttctggccgaggatcatattttaccagctgcaagtgtcggtggaaaagaaaccaatagctataaggaaattaatgacaagcctacaggcggcagtaacaagtaaagtttatatactaatcccttttaaatgtcgtatatatatacatatagttgcagcaaagcaagtgaagcacttgaatattaatttatatatatgttgttgcagggagattttagcttacttgagtgctgcagaaacacatataggagtaaagccagctccaatcatagctggattctcatccaggggtcccagttccgtgcaaccattgatcctaaaggtctataatatatacattttgttaactacacctacatgactaggtcattaacttttaattcttacaattaatgattcattagagatgaatttgtggctaaccgtaacttgtttctttttttagcctgacataacaggtcctggtgtgagcataattgctgctttttcacaagccgcgggtccgactaatcttgcaacagatagacgtcgggttcttttcaccgtgcaacagggaacttctatgtcttgtcctcatgttgctggcattgcgggtcttctcaaaacatatcaccctaattggagtccagcagctatcaaatctgctattatgactacaggtacgttcattaccaaagtaatatccatataaaatcttcatgcacaccaaatcattggcggcttattaacaactatgctttttatttatttcagctacaacactagataacaccaaccaaccgattcggaatgcatttgataagatagcaactcccttcgaatacggcgccggacacattcaacctaaccttgcaattcaccctggacttgtttatgatttaagcacaaccgattacttgaacttcctatgtgcttctggttacaacaaagctttactcaagttttttctcaatttggaatccccttacagttgtcccaagtcttacagaattgaagatttcaactatccttcaattacggtgcatcatcctggctcaaagactattaatgttactcgaacagttacaaatgttgggcctccaagcacgtatgttgtgaatactcactggccgaaggggattaaggttcttgtgcaaccaagttcgttgacttttaagaaaactggagaaaaaaagaagtttcaggttattcttcaggcaattggtgtgcctggtcacaacattcctttatttgggaatttgtcttggacagatggcaagcacagagtaactagtccaatcgtagtgctggacacttagaaattactattgttatgttataattgtcattttagtttgtttgccttttgttgttttttaggctgtaatataagcgtgttttctgttcatgttgcattgaagtgctttgtcacaaaaaataaaaggcacaatcaataatatgcagtttagaaaaaaaaaaaaatttgatccggtgtaaactattttactgggaactaaaatcatctcgaaaaaaagccccaatcttacggattatctttctttcccaccgtgggggccttgagaaggtcccccacgcttgccacggccttcaataatatgcagtttaaaagtatagttgtataatgaagaaaagagaggggtaaaaaaaagaatatatagatacggttatgtgagactaaaactccaaaaaatcagtgatatcataggtcctagagaggtaattagaactgcgggatgcggtgattaataggtaagattatattgttgtgcctgcttgtaatttggcatatttaagattattgtttccttttccttttgaaaaacagatgaaactttcattatttaactacgcaacttgttcttttccttggtttctcataaatcaaacacggagtcatgatgatacttacttgactttggagattgacttgatccaaaaatccaagtcattggtggctataattttgtaaatttaattaataggttaaagtgtaattttattcttcaagttttttaatttatgttggttttacctttttaattataatatttggtcatctaattttataaattggtaattttggttccttgttagattattaataatcaattgtgattaataaagttatgaaattaattaaaaaccattaattattaaaaacattaataaaattaagaattattaatcctaatcctttacaacattgcactcctcctcttttatacaaacatctctttcacttccattgctgcacatgacttcaagtagcaacacatttggataaataatcttttatgaaggtttttttaatgattaatagtttttatttaacttataattaacttaataactctattaattataattattagttaataatcaatcattgaaaccataatcatcaattcataaaactaggagatcaaatgttataattaaaaattaggaaaaactaaaatcatgaatttagaaaattaagagggactaaaattacaatttaactttattaataatatgttaaacaaattattgatccttgccattcatttttatgaatttggtagtctacgtaggaaaggaaaaattctttgtaaattacacatacttcccttaactattccttcattttttcaccctagaaattccgctaatttaaatatttaatggctctcataagtcataacagcagctacccctcaccctcaaacttacttaactctgttaacagaagcgcacacttgactgacacgggtttttaatgatattatgtttcaagaatgtccgtcatttgctactgatttccagcacatgaaattgaagcactgtccaaaaatgaccatttccttcttaaaccatttatttgatctggagttcatcacttaactataaacgaaaaatttagaagataaatttcaaaaacaaactaagataggcaatgaaaaacatgaataatttttttacacacacatctgcttcccaatccgcttacaatggcaagtttaatacccgccttcaaaactggaaatttcttctgtgaacttacaagaacaaacaaaactaacgtcacagtagtttctcaatgtattagattcttttatatatctcgcactccacagataagccaataacagattacaaccaaatagcaacaacaagccaataacggaactattgaagaacaataaaatttaaaaaacttcaagaacccattgaagaattaaaagaaaccctgtgaaaaacttcaagaacccggttatgaaggagtgagaaccagatctgcgaaactctgacagcggcgcagcggtgaccactcctccttcaatcacgctatcatcctccgcggcggcaactgaaagtgggggcagatccggattcttcatgctgtttaaaggatggggctgaaagtatcgttaaaaaacataaggatgtcgtgtaataagtccaaactttgggaaagttcttgtaatttatgcttgtttaatttaaacagaaactaaacgttagggagatagcctatgttccttttgtgtctgctcaaattgagatggccatagggaggtaagcattgaacatcttagactcaaaatctaaagttgttcctgtttaaagatgaccgaatactttctcttcttgttgtgtcctttccttctcgttgtatcattcttttcgggctgtaatttcttattacatggcaaagctatcctccgaaggtgagatacatctaaaaaaatactcccatactcaacttaagtctcaacatagagagaaaaatgtatgtactgagtgactggataaaataatctgttactttgagaatttaattttatatatatatatatatatatatataggccttacctcttaattaagggagcttaatatggaattatttgatagtgttaatatagtattaagataagataaactaaatttcttaattttaatggagtggttgtagagagtgtacaatcgtagttgtgaaaattgatttgaactgaccggttggattggttgaattggaaattggagcatcaatcgggtcgagttggctaatgaaccggtcatgcatgtgacccagtttggtccgaaaaaaatcgagcggttttgagaagaaccggaaatccgatcggtttttaggacccggacgggttggtgaagaaaaaaaaagcttagccacacaaaacggcgtcgtcgagatggagacgcttgttctctgtctcgacggaaatgatggcttcatcggcgttcacggctttggagatggagttggcattagatttggtgttttcgggttgcagatcttcaagcttgttttttgttttcagagggaacggggctggcagcgggtgccacaacttcttcatctgccattagctgtgatagtgaaagagaagtgtgcgctgagagggaaataaaagagtgagttcgaccgagaggaaaatatatatttttttaatcaatgctcaacaacaatgcatttttttaatcaacgctttcttcttcaatagatgcggtaagtacaaaaattcagccaaagaagaagaaatggtcttcaatggaaagcgcagcagtcgcaaccaacattcaacaaggaagaaaagaaagtatatatagtggataggtttttaaattccttatctagcggggtttctttggacctaatttactttatgtattcattttttttgctttattcagttttcatataactttttgaaatgagtttttgtgtttttatataggtagttgttatttacagtcttttttatttttaatatactttacttgtattattaactttaatacttcaattgttattttggattttccattatagaattatggatgaatttttcttaatcaaataatattagttatatacgtatatataatataattttgaattttttaatatagaccggaccaaatctggtcaattattgatccaccggttgaaccactgacttagtgacccactatcttgaccggaccagttttcacaacatgtacaatacttttctttaatagagtggttgtcgagaggatgttagactatactaatttaataagaactaaaagcaaataatctatatattacaaagaaaaataaaagaaaataaatatattataagaattaaaataaaataaaaaataataaaactaattttttctacaagaaacattttaaaaaataattttataaggaaataaatatgttataggaattaaaatatatttgaaacatttttcatttaaatggttttttctatctctactcctatttttaaaaattcaaaatttcactttttttaataaaataaaaatattgaactagttttaagcataatttaataaacactcaaaaaaatatcgaccgtacgtaagtccgtaagtgcgcttttgttcaatttgtttgtacgcgttctttcagtctttcacatattgaccatgagcagcatttctgctatttcattataactactacatccatcctataattttttgagaatttctttttcgataagatctcttttacattgttttttatattaattactttttactaaaatactcttgattattttgcatatatttaattgtacactgtaacactaaattataattatttcatgaatttacaatttgaatattttccgcagattttatcataacaataatttttaattttgctcattttacggatctattgttaaatgtgtaatgacattttgacatgtctttagaaacaatttaaattataacgttgtttggtagaatttaaaatttattaaaaatcataaaattttgagtcttacgttatatataggaaggaacgtggtagctttgagcgtccaacatcttgtactttcccataatcacccaatagctcaaacatggttttcactaagctttcattaattcgactgattttctgttcactcctaaatctccattcctcccaagttttcacgttttcatcttttgcctttgctgccatcactgcttatgaagggacggaagcaaatgctctagttgagtggaaagctagccttgacaaccaaagccaagcttctctgtcttcatggacaagtggtgtcagtccttgcaggtggaaaggaatcgtttgtgacgaatccatctctgtgaccgctataaatgttacaaatcttgggctaaaaggtactcttcacactcttaacttctcatcctttcccaagctgctaactctggatattagttacaacagttttactggaactattcctcagcaaattgctaacttgtccagactttctcaattgataacgaatgctaataattttagtggctcaatccccatttccatgatgaagttggctaacttgtcaattctaaacttggaatacaataaactttcgggctctattcctgaggagattggagaattgcagaacttgaagcgtctaatacttcaagggaatcgactttctggtaccattcctccaacaattggaaggttgtccaaccttgttagacttgaattgtcaaaaaactctatctctggtacaatccccacttcaattacaaacttgacaaatttagaactccttcagctcacactcaatagtctttctggctccattccatcctccataggagacttggtcaatttgattgtttttgaaatcgataaaaataaaatttcaggattaattccttccagtattggaaacttgacaaagctggtcagtatgtccattggcgttaacatgatttctggatcaattcctacctccatcggaaacttggtcaatctaatgagcatataccttgcttttaacaatatttccggagttattccttccacctttggaaatttgacaaagctcacccatttactagttcataaaaacaaacttaatggtagattaccacccgcaatgaataacttcaccaatttcatatcgttacaactatctaataacggtttgaccggccctttgccgcaacaaatttgccttggtggttcacttgaacaatttgctgctaactctaattatttcacgggtccagttccaaaaagcctgaaaaattgctccagtcttgctagactcagactagatggaaaccagatgaccggaaatatatcagatgtttttggtgtatatccagagttggactacgttgatctgagtagcaataattttcatggccacatttcaccaaactgggcaaagtgtcctaatctcacaagccttatgatgtccaacaacaatttatctggtggtatacccctagaacttggccaggcgcccaagttacagagacttttcttgtcttcaaatcatctaacaggaaaaattccaaaagaacttggaaaattgacctctttgttggagctatcaataggcgacaatgaacttttgggtaacattcctacagaaataggttctttgtcccgccttgaaaaattggagcttgcagcaaataatttaggtggcccaattccaaaacaggtgggatctttacttaaattacttcacttgaacttgagcaacaacaaattcacagaaagcattccttgggaatttaacgaattgcaatctcttcaagatcttgatcttagttggaatttgctaaatggagaaataccagcagcacttgcgagtatgcaaagattggaaaagctaaacctctcgcacaacaatctctctggagccattcctgattttaagaatagcttggcaaatgttgacatatctaacaaccaattggagggttcaattcctaacattccagcctttcttaatgcttcatttgatgcattgaaaaataataaaggcttgtgtggaaatgcctccagtttggtgccttgcaacaccccaactcatgataaaatgaaaagaaatgtcatcatgttggcattactcctttctttctgcgctttatttctattattattggtggttggaatttcgttatgtatttgctaccgaagagcaacaaaggccaaaaaggaggaggataaagaagaaaaaagtgaggatcattattccatatggagttatgatggaaaattagtgtatgaagatatcatggaagccacagaggggtttgatgacaaatatctcattggagaaggtaggtctgcatctgtttataaggcaatattacccacagaacatgttgttgctgtgaaaaaacttcatgcttcaaccaacgaggaaacacccggtttaagagcttttacaactgaggttaaagccttggcagagatcaagcatcgtaacattgtgaagtcacttggatattgtttacatccacgcttctcctttttggtttacgagttcctagaggggggtagcttggataaagtactaaacaatgatacacgtgcaacaatatttgattgggaaaggagggtgaaggttgttaaaggtttggcaagtgctttgtaccatatgcatcacggttgctttcctcctattgttcatcgtgacatatcaagcaagaatgttcttatagatttggattatgaagcccacatttgtgactttggaacagctaaaattctgaatcctgattcacaaaatttaaccgcatttgcaggcacctatggatatgctgcaccaggttaggccctttttgtttttaagaagttaatcctatatatacttgtttcaataataagtcatgctacttcttgtgtaatatcattttcatattttgatatattacagagcttgcttatactatggaagtgaatgagaaatgtgatgtttttagttttggagtgctttgtttggaaataatgatgggaaaacatccaggaaatctgatttcttcattattatcaccctctgcaatgtcatcagtgtccaatttcctgttaaaggatgtgttggaccaacgactacctgatccagtgaagccagttgttaaggaggtgatcttgattgcaaatataacattagcttgcttacgtgaaagtccacattttcgcccaagcatggaacaagtgtataacgagtttgtgatgccaacatcatcttcagtgaatttattctccatgatcacacttggtcaactcagagataattgaaccttgttttatggtgtattaattgtaagctttttgttatattaatgtttgttgtgtgcgtgttttacatgtttcttctattttgtcagacctggaaaatattgcaaagctgtcttatgtctttaagtaagaccccgagtctttattttgtaggttgaataaatacggtctagttttaaagggagacagtagtgatgtcttttaagtaattaaggatgttttgactatatatttcaacattaacgtaccacttgaactctcttccaattcatgatacatagtctaaataccatttaggactatggccaatttgcaatatgatttttattaaaatctattgttcaaaatatccttatgcgaattttcttgcagattaaccatagatctaagtgatattcaaaatacagttgctacaaaggaagcagtttgggattttagcgctagtcttcactcttcagtacggcgtctaatttcattttttttttattttttaatcaaatctaactagtttgggattttagtgattgactttattttttattttttaaaaataaatccttcaaaaatctgaaattaaaataagctaaatcaaatgcattacttcaatatatgcttccttgattccgatcaggtagagcactcttgcacgcggccccaatttgaacgtaattaattgtagtgccagctgttggattaattgaaaatatatactatgattgttatctcaaactcactcaaaaaattgaaccaagttgccaacattggaccagaagcgaggaggaaaaacaaaaaaaatctggacctctcgactttgaaaatccaagaaaaccttatctacccttatcctaaacaagatcgcatgttggtatcttgattggaagaacttgtattgaatggcaaagtatatgataatttcgtttctattatatattatgtatcatgtttgatttgtggaccttacaactacacaagtcttttcacaccacgtggtgggaatgttaatttgatttgtaaatataccaacctaaattagacaagacacaagagtatcataaaacaagcatataagtggaacaactaccacttccctacttggcccattaacaacatcattatgaacctcaaaatcacattattatagtttgagtaaattatattcacatttcatatgttttttttttaaaattgtattcgatactcttttcttattatatattacttttatcctattctgttaacattgttaattaatgtcaattgaaatatttgaatagacaaatttttttattaaagtaaattatactcgcacttcggtatttttttttcaaattgtaggtactcctcattttttatacattattgatctcgacggaggcgttaaggctgttaatgttattggccctgacgacgtcagtgtttagggaaccagacacaatgatgatggtggtcgaagatacaacaggggacgagaaggtgatggaggtggatatgacggtggtggtagcgattacggtggacgtggttgctccgacgagagtggatggggacgacaataaggaggaagaaataatgttgctgtgggagagggaggaagaggagaaggaggtggtggtggtaagtaaagaaggattgttgaagaagaggaggatttgtaaaactcaatatttgattttaaggaagaagataaagatattttagatataaattttcatcaaaagttatgtgaccagcatatgcttattttcttttaaattattaaattgtgtttaggaaggagaaagtctggctgtaatataagctaaacaattaaaagaattttttgtagggtgcaaaaaaggagaaatatgcgagtgtaatttactcttatagttttcacactatttaaattgatggaccgggttaaagtcttgggcaatttcaatgtagataactgatttgtggccatcctagtgatgccgcctgcagctaaggttttaacttgtggtcatgattagcgttgcgttttcattataatcgttttcattgtaatctttgtaatgtgcaaaattgcagataatacacaattaatgcagcctcagttaatgtaatggtagagatctcaatttttttgacgttgcagataaataaaatctttttaaaaccttggatgcagcaagaagtacatatatggtcaaagaaagtgggactaatatgccatacatgtatttaatacttaatactttgtttctttaagcattcttgagggaggaagaaactagccaagttctaaaatgagaaattaagctgtagtaacaaacaaacaaaagatataatgttgtgataccctgacgacaaattattagcacagtgcaaaagattgaagaagctggcgcaccatgtatattgcagtccacactccatgttatatagagtgctaaaagctaggctactctaaaactacataaaactactattaaaacggaagagaagataaaagataacattgatatttttcattcatgatgataggtaaaggaaaatacatttagatagtactaaatgatattaatccatatgtggttctggtgaaagagaatcaatttagtgacatttcacacttcaactactatactttttctgtggtgaatgtgcatttattattattattattcatgtgttttggaacgttctgaaaatttataggctttgaacaaatgttttactgtttggttgttcttttgcatctcttcccttttaaggaatgagaagggactaattttcaggtgtttcgtgtgcaattttgaggcaagaatcgtggtattattaatcaagaatttactgaggtgtaaattcttcctaatttgatgtttggggtgttggaaatggaatgacaaagataaaataagagcttacactaaattaaaatttcactcaagaacaaaatattacaacaacaaaatacaagtgttataacactaactcaaactttgtatttctctcaaatctctctttcttttctcacataagtgtttcaacactatttctcactttttacacacttttctcttcacttccttactttcactacatgcatcattttcgagtgttctatttgattgtccacgtccatcacgtccgccacgaccacctcgagtgttgaatctacctcgagtgttgaaacatcctctatatccaccacgatttcctctgccacgtccaaagctactgctagctcgattttcatcaaatgataacttactttgcaaagcttgctccaaactgctagagccttcattcagattcattctttgctcatgagcttgaagggaacccacaagctcatcaataggcatcgccgtcaaatctttagcttcttcaatggcagtgacaatataatcaaactttcttgttagtgatcgaagaaccttctccatgattctgacttcatctaaggcttctccgtttcttttcatctccttggtcaccttttgcactcgagagacatagtctgtgacttgttctccattttgcatcttcaagttttcaaactcagctctaagtgattggagccgcacctttttggctttatcagctccttggcaggatttctgcaagattttccatgcttctttggatgactttgcgtctgatattttttcaaaggttgtttcatcaactccttgaaatataaaaaatagagccttcttatccttctttcgtaactctttaagtgtccttctctgagcatctgataaaccagcttcagcagcggcatcagcgggctctatgtatccatcttcaataaggtctcatgcatcttgggaacctaatagagccttcatctgaatgctccaatttccataatttgtttttgacaactttggaatttgtggttgcatcatctctgccattttgatcgaacgtggctctgataccacttgttggaaatggaatgacaaagataaaataagagtcatacaatcgtggacgaggtcgaggatttatgaccagaggaggaggcagatttcaaaaaagaggtgacaaatctcatatgcaatgttataattgcaacagatttggccatcttagttacgaatgcagagaatcccctaaatttgaggagagaagtcattatacaacaaatgaagagaaagctgatgaactgaccatgttgttcacttacaaagacaaggaagatagtagcaaagatgtttggtacctcgatactggagctagcaaccatatgagcggaaacaaagagttattcacagagttgaacgagaacgttcaaggagaagttacttttggagatctatcaaaagttccagtcaaaggcaaagggaagatcatgatttttacaaagaacggagatagaaaatatatttatgatgttttctatatcccatctttgaaaagcaatctcctcagtcttggtcaacttttggagaaaggatataatatacatttggagaataatacacttatcatcagaaatcaaaaaggagaattgattgcaaaagttgatatgacaagaaatcgcctattcaagctcaaaatccagacagaagcaataagatgcatgaagtctgacataaaagatagttcgtggttgtggcatctcagatttggtcatcttggatttactggtctgaagctattgtcaaaagcaaagatggtgaatggattaccagaaatcaatcatccagatcagttatgtgaaagttgtatgaagggaaagcaacatagacaaagttttgaagtaggcaagacatggagagctagaagaccgttgcagctagttcattcggacatagctggtccgtttgatatttcatcccttggaggaaacaggtactatatcacatttattgatgatttcagcagaaaaacttgggtgtatatcatcaaagaaaaatcacaagcccttgataaattcaaggaatttaaagcaatggcagaaaagcaaagtggtcaatatctgaagatactcagaatagatagaggtggtgaatatacgtcaaaattgtttgaagaattttgcagacaacatggaataatacatcagttgacagctgcctatagcccacaacaaaatgggattgcagaaagaaagaatcgtacaattcttgatatggcgagaagcatgcttaaggaaaagtacttgccaagaacactttgggctgaagctgttagttgtgctacttacttattgaatcgatgtccaacaaaaagtgtaagctcttattttatctttgtcattccatttccaacatggggcaccagacgtaagctgtttttttccctatcaattttgaaattcctcatattttgcctaccagttgttttgtttactcgttttcctaattatggcagaaagtcaatcatagcttttaagttcttatttatttacatgttaatattgttgaaacaaataattttggagaataatgtgtttaaactccatgaactactgttctttcacctttgcatttatatagttagttttgttgtatttaaacaggttggtcaagatgacatgcatcacggtatactctattgatatgattccctaaagttataacttttgtcgcataacagggaaatccttcaatctaaattttattaatggattgcaagagttctttagtgaggaattgtcatcattcatcaagtattgaccaagaagataccgagatatccaagattttttttttgagtttagtgaactttgcaatgactcttatgataaattatcgtgcagttgagatgtcaaacagatcaaaattaagtggtgtttgctgaaataatgtcttttttatataaaatgaaagaaatttacattggttttggcttgatcctcaaaatttccaacacttctttgtatacgtatgcttaagaataaagaaaaaagattagtataagacagcagtactttttatggactataataaagttatttacaagcaataataaaggacagtgaatgagtacaattggaatttggaaagctacttttagttattagtattgccagtaaacatacataggtttcaccaaaacggtaatggcctttaccagcattcattataatggcggtaaacccttttccgactctggaaaaggtgacatagtctaatagccggtaacactttttgagggaatttatattgccggtaaatggtatataacaattgccggtaaaagttatttttgttcacattgtgaagttaaaagggttctgttcacacttcacatccatgcttttcgtttctggtctgagttccttgaatgggggagtttggacaaattacaaaaggatgatgcaaaagcaataatgtttgattggaataggaggctgaatgtagtttaaggtgtggaaagtgctctataccatatgcatcacggttgctctcctcctatactaaaacgtgacatttcaagcaagaatgttcttatagacttggaatatgaagctcgcttctctgactttggaactgctaaaattctgaatactgattcacgcaatttaaactcctttgtagttgtaggcacctataggtatgctgcaccaggtttggcacttcatgttgctcttaagacatcaatcttatataccatatactcttgtttcagttactatatgagtaattttattttcatattttaatttatggtagagcttgtttatactgtggaagtgaatgagaaacatgattgttgctcttttgttttggtgtcctttctttggaaataatcatgggaaagcatcctgttgatctcatttcttcattgttttcattgtcaacaacaccatcagcatctaatttgttattgaaggatgtgttgtaccacaataaatgttaagaaaaattgggttacaaggtactcttctcaatctcaacttatcatcctttcttaacttgctcaatctggatgtgagtttcaagtccttgcattggcatattccccacaatattggtcagttgtccagagtttctcaattgaaaatggataacagtaattttaatggttccatccctctagaaatagggggaactgagaggtcaaagtcaccttgacatctccaaatgtaagctaaacgggtcaattccagtttccatagtaaagcatgccaacttattatatctagatttagctggcaacaaacacttgatttgtcaactaataatttctccggagccagcccttcacttaggaacttgagaaacttaatgcaacctttcctatttaacaaccatctctctggccccattcctgaggagttgggaaaacattattctctcaaagcaatcaaattgttgaacaataatttgtcttgcccaatcccatcttccataggggatttggccaatttgagcacacttatgctcagtggtaataaacttgggggatcaattgcttccactctttggaaatttgacaaaacacactgaattggtcctaaagcaacctaaagcaaaaccatctttctgggtaaatccctgtttccataggaaacttggtcaattttcagaggcttcgcctctcagaaaaccaactttctggaactattccgtccacctttggaaatttgacaaagctcacccatctagtgctcatcacaggtccagttccaacaagcttgaagaattgttccacccttgtcaaactcatacttggagacaaccatttgacaggaaatatatccgacgagtttggtgtatatccacatttgaacaacattgatctgacaaggaataatgtttatggtcacatttcaccaaattggaccaattgccatagtctaacaagcgttaaaatgtctagcaacaacttatccggtggtaaaccaccggagctcggccaggcacccaaattataacaagttcaactttcttcaaataatataagtggaaaaagtccaaaacaaattggcatattgaccctgttgtttgaactctctttgagtcacaatgaattttctgactacattcccacagaaatgggatctttgctaaaccttcaatgtttgaagcttgcagcaaatagtctaactggtccaattccaaatcaacttggacgacagcgcaagttaattgacttgaatttggcgataataaattatcacatggccttccgtctggatttaactaattgcagtctcttcaaactcttgatcttagtggaaacttgttaaatggacaaataccatatcacttggaaagtagcacagattggaaaatttgaatctctcgcacaataatctctggcaccattccatccaattttaggaatttgttgagttagacaaatgttgacatatctaacaactaattagaggttccaattcctgatattccagcctttcttaaagcctcatttgaagcattggaaaacaataaagactcatgtagtaatatctcgggcttgacaccttgccaaaagttgagtcacaaccatcacagtaaaaggaaaaatgtcatgatgttggcgatttccttgacctcgggtgctttatttctagttgtggtcctggttggaggttcattatgtattcatcaccagggagcaagaaaatcagaaaaacaggttatagaagaacaaactcaagattatttttccatattgggttatgatgaaaaaacagtgtatcaaaatatcaatgaatccacaaaggtgtttgatgataattatctcattggaggaggaggttctggagctgtttacaaggatattttatcatctggccatgtcgttcctgtgaaaaaatttcatgctgcagtggatagggaaatgctcaatttaaaatcttttacaagcgaagttcaagccttaacaaatcaaacatcataacattgtgaagttaaaagggttttgttcagatccacgcttctcgtttctggtctctgagttacttgaagggggaagctgggataaagtactaaaggatgatgcaaaagcaataatgattgactggaatagcagggtaaatgtagttaaaggtgtgtaaagtcctctatagcatatgtaacataattgctctcctcctatacttcatcgtggcatatcaagcaggaatgttcttatagacttggattacgaagctcgcatctctgactttggaactgctaaaattctgaatactgattcatgcaatttaacctcctttgtaggcaccaatgagcatgtcacttcatttttccctgaggttttgtttgggagaggaattttagaggggaaggaagggatgggaaagatttaggtagtgacatctctttatttgagagttttaatttttgaggaaaaggattttaaaatccctctaaaatctttcaaagtctaaaaattgttgtcccctaatttaaagatttttagaaggaaaagtaattaaaattattatcctaccccagctacacgttcaaaaatatattaaaatatatttttaatatatttttacatttaagttatataattttttacatttaatatcttattaatttttcatttttctctcttaatatatttttaactctcaaataaggagaaagaatttctctcattttcctctcattccttccccttccttcctcttgaatctctttccttcccttcctctcataactcccaaacaaagcctaaaaaaattaatcttacacactcttgtttctacttctaatacgagcaattttattttcatattttaatttaatgtagagcttgcttatactatggaagtgaatgagaaatgtgatgtcttcagttttggagtcctttctttgaaaataatcgtgggaaagcatcctggtgatctcatctcttcattgttttcattgtcaacaacgccatcagcatttaatttgttattgaagaatgtgttggacccacaacttacgcttccaatgaagccaatagctccgtggttgatcatagttgcaaaagtaatatttgcttgcttgattgaaagtccacagtctcgtcctaccatgaaacgtgtgtcaggtgtttgtgaattgtgatgctaaaatcacctttaatgggtccatttcctgttatcacaattggataactctaaaataattggacttggatttattttgcattgtaagcattcttgtctttctgctttgtaagaaatcatgtaataccgcatagttataggattattattgtaacaattgtactaggcatgggtttaagagcataacaatagaaaccaattattcctattatattttacatgtttaatgcattaacttaataatttttgtaagaaaataacccaattgtttacactttcatgtgattcatgttttgacatctttagttgaaaaatagtatgattgcacttacgtatttgtgtttttaaacgtaaaaaacgtgcaaggaaacagaagatgtccaagacttagaaagaagagcaagacaaactcacaaagaaagtcaagtctaacttggggactcctgtaatgtaactgggatgatcttgatgtttgaagaaactttaaacatagatttatactttttatggagcttagttttttcttttggttgattcatggagagactctaatcagatttaacacggatcatacatgaaatggggcttaaagttgaagttgatgccctatcagagagcttgtcataggatataaattaattgaattgattttgtttttcctcaaagaatcttaaaaagtaatttaagtaaagtcataattagtttaagtaaatcttaattattatttttttcttatagacttagaaataattaacaataaatttacttctagcatatatttctcagtaggtaggtgacgtacatttcgtacaccaatcattaattcttcacattaaaatcgtcaatcctgaaaacggtgaaagcagagttttgttttttaaattaaagatgctcaaatattattgatgaaatagagaaaatagaccattgctcatgatttggttcaatttagggttgttcgcgggtcggttcggatcaattttgattaaatttaggatctaattcaatcaaatttgatcggctcggttggattcgatttttagaagaagaaaaaatagaaatccaacccaatccaactcattcatcaacggttcggtttggttcggatcattgggttacccatttaattttttttagaactactattttatatcacgattctttcaaatatcccatacaattaacacaatattattaaatgtatgaaagtagtaaaattgattcatttaatactgttaaaaatcacatatgcataaattggaataataattcatgattcgtttcatttattcatctgttctctctcatctatctttcctcaacatgaggttcttatataagagagaaattcaacaaaatgctaataatacgagaaaataacaaactgatctaatcttaattcctattcaaatattaaaatataataacaaactgtaacaacataataaatcataacaataatttgaaatttaaattatacaattcaacactccccctcaagttggtgcatgaatatcggtcatgcccaacttgccaattgcttcttcaaacactcttccaggaatgactttgatcagcaataggttcaagaggtgcttcatgatagtccacgtgcttcggttatgtgaggtagaaagaaaattgaaatacgagaagagattcggaacaataacatgttcatgtcaataaacttcagggatggtctatgaagattcagaacaatgcaactgacttcacatcaatgaccttcaaatagaatacgtgcaaggagaattgagatacgagaatggattcggaacaatcacatgttcatgtcaatagacttcgagtttggtctgtgaacaactcaaaacaacggaacgagtttcacattaatgacattcaaatggatacgagaaggatacgaggcaaaaatgaaatttatgataataataatcataatttgtaaaggaatcgaagaaggtgaaggttaaggaggagatagatgattaggtataagtgaaatatattgaagataagataaaaagatagaaggagatatacgtttgggaatgtgaagaagaaggactttgaaaaaataaggcagcagaaatattatttttttcatggaggattcatggaggataccatgattctcattcatggaagaatcatggctctgataccataaattggaataataattcatgattcgtttcattcattcagctgttctctctcatctatcttccctcaacatgaggttcttatataagagagagaaattcaacaaaatactaataatacaggataataacaaactgatctaatcttaattcctattcaaatattgaaatataataacaaactgtaacaacataataaatcctaacaataatttgaaatttaaattatacaattcaacaaataccatcaacataatattctaaaatagacttataatataaattaaaacaaaagatttttgaacaaaatttactataatagtctgaatcacaattgtttcttacaaatcaagctttgttataaccaatttttttacaaccatatttactgaaacaaataaataaacaaaatatgattcattaatattataaacatgataaacaaaatatgaaaaaaaatcataaccttaaatcaattcttatttcaaagcaacatattgttagtacattggttcttctgatcaaattttccattattttgttttcagctacttaaagttttaaagtagggaacataactcaaatgtctaaaatacaaggtcctaaataattagttgagtgctatgatttatttatataaactgtggatgaccaatttaagtcaattgagaacttttttaattataaaaatttgctattaaaactttaacatatgaatattgtgttggtcccagatgaactcaagagggggtgaattgagttttataaaataattaataattaaaaatcaaactcaaagcaataatatggaaataagagataaagaagacacaatcaattttaacgtgaaaacccaattaggtaaaaaatcacgatgtccaaattggataatcaattcaatggacaactcaactatgataattttgtatacaagagtttctaatatcctagtttcctagtctacctacctttacacaacaattatcccacctggtatccttgtttcccagcaaaaaaactctagtttcaattcaccaagaatagagaaagactggtatcattgtttcccaaccagactggtatcctagttttccagccagaagtcgtacgtctcaattcatcaagaacagagacaaaattgatatcatagttttcctgctgcgaccttttccaaagtcaagaagaataatacaataaaatagttaccaacacttctactccttaagcaaataggtacctttaaatcctgatggagagttgaagaatcggacttgacaaacgcttctatatgatgtcacagcaaaatatctcaatgatacaaacttaaactttctaaaactctaatattatttggaatggaatgcatacatgaacaccaaaatatgtttctatttatactaatttaaagatagattttaaccaatttttgaatcttatccaatgcaattttaaagatattttattatattatgcaatgcaatcttaaaaatattctatcctattttttaatgcaatattaaaaaatattttatcctatttttgaatgcaatcttaaacatttacaatatcacaccttttttttattgtcaaattattttttttaatttttaatatatatatataataaaatttaaattattattacgggttcacggatcgggtcatcgggtcaacggatctgtaaatctaaatccgtaattcaacctgaatatgaacgattttgatcgattcgatttgatttttatccaaatatataaataactcaacccaaattattcggatcggttcggatcattcaggttaacggatgatagatacctgtgaacacctctagtccaaatgaaatgggacctcctcctgaatccaacatccatttaataaataaaaagacaagaaagctaaacaagggacagctcgccttgtcttttttgtgaatagcaattcttaccttgaagcataagaactaattcttctcggcaaaagaacccaaataatacatttttaataaaaaaattatgaatttggggctgtttttaaactaattaccaacttggggcaataggtcacgcccaaaattgggcgtgccagtcacgcctggtgttgggcgtgactaaattcgtcactaaatccgtcgctaaatctgttagcgaccgatttagcgacggaatatttgttttttaatttttttgtttgcgagcaaaatattccgtcgtaaaaactgttagcgactaaaataaaaatcaaaattggcgttttttaatttttgacgtaaaatatcatttaatattatttatttttatttaatttgaaagtatttttagactgatcttcatcatagatatgatcttttttacttttttttaatattgttttatttagtatttttttaaattttatatgattttatttaatatattctggatttttgtatatataatttttaatatattattttgtttaatataatttataaatttttatatgattttgtttaatattttttggattttgtatatataactaatttttaatataatattttatttaataattttattttggaatttgaaaaaattgaaaatttttattttttgatacttctcattttttctaaatttttgtaaataaatttttaatatagaaagcattttaaatagaatattatattttgatacttctcattttttatatcgaaactaccccatggtgaatgatcaattctttgcatttcaatttgatttactttgtctctcacagtttcactcctatttctagagttctgcaatgtttcaccgctccaagtgcgctttggaattaatggggtgctacaattccgattattgtgtggtgagtgcactttgggatgagcggaacgagtggtaaagtgtggaatgagtgcgaaaaagttaggaatgaatgtgctttgggataaatggggttattatacaaaaaatccaaaaatattaaacaaaaccatataaaaatttagaatatcgaaaaaagttacaacggtgtacgatatgtccttcaaatggtctaacttttgataaaaatatccgatcgaggtgtacgatatgtcgaaatgctcgaaattaatagaagtaattaaaaaataaaaaatagcatacaattaactgactaaataattaaaaaagtagaaaataataaaatttttagatgaaatcataattttgaggcacttagaggtcttttttgggaaaaaattttgtccaagtcccctttggttacttgccagaggcttctcctctcaatttcgagcgcatgaccaccgatttcgtcttaatcggacattccagtcaaaaattatgaccgtccgaaatttatatacgcatcgctccatctgtgcatgacaggtatcaggagtaggtcacgtctagaactggtcgtaactggtcacgcccaacaccagacgtaactgccccctagtcacgcctagtgctgggcgtgactggtctggagtgaccaactgtcctaaattggtaaatagttttgaaacagcctcaaatatataattttttatttaaattgtattatttgagttgttttgctaattcttctcacatcctctgccagactatgaaataggcttcttcttatacctaatattaaaaaaaagaagaaaaagaaatatgtttcttccacgcctgacaaagctgaaaacaattcatttcatatcgagctcctattatgcataactctgccactttaatttttgcccatataaatgcaaaacgcattatctccctcgggcacaattcttactctgttatgataaatgttgaatcattgctttcttgttttggtgtacggtgaagagaaaagaataataaaaataatggatgtaataaatgttataatgaaaaataaagggagaaagataaggacaaaaaaaaccatagaatagaattaggataaaaaatgaggaaaaagttaaaataatactattttttaaaaaattacaaatttaaacttgttttgaaactatttataaatatgagactatcaaacacgtttaaattagatgtgactaaatacgtctaattttgaacgtgacacatgaagtaatacgttcaaattagacgtattcaattatgcacaatttgaatatgtttgacaaccttgtgtttatataattttaaaatagttttaaatttgtaattttttttaaaataatattattttaaattttttccccaaaaaagaaaagaataaaagaataaaaacaaagtaaatatatgttacccattttccaatataagcagaggcacagtctggactaagccagcccagaacagaacaacagttgaagatacatgatgtcattctccatcttcaaacttgttttgacatcatttcttctctgctttttcttgcaggagcctaccaatgctcttagaaaggcaagtaagctttgcattttattagttccctgattgttttctcgtcaatcttatggagttttgtaactgttcaagttccaactttgagaatttccctgattttatattttgttggattctgtgtttccagacctacattgtgtacatgggaggacattctcatggtccagaccctttgcctagtgatcttgaaacagccacaaattcccatcatgatttactcgcttcttacttaggaaggtaaaacaaatgttaatttctgttaaatattattaggacgtacgtgttaattaaaaattgataatttaacagtcatgagaaggccaaggaagcaatgatgtactcgtacaataagcacatcaatggctttgctgccctacttgaagaggaagaagcatcacagattgcaagtgagcaaagactattactattaccattaccatgaccatgattttgtactcatcttgaagcctcacaaattgatataatgtaatatatgtttgtattggttcagaaaacccaaatgtagtttctgttttcttgagcaaagaacacaaattgcatacaaccaggtcatgggaatttcttggactggaaaaaaatggaagaattcctgcaaactctgcttggaggaaagcaagatttggagaaaatataatcatcgctaatatcgatacaggtatgcatattgcttagttttttttttcttttttagtagatgcataatgctttagttaaaattaacatttattagagattatgaaattataaatgttttttatattgttattcaattataaggtattatgtatgctaagtttttttgttggtacaatatgaaaaatgtatgataagtttgttattttttataaaaaaaagatactttaaaagttattcaaacaataatttttaattaattagatgtatactataattatgcataaaatttaaactaaaaacgaaacgtattcctttaaagcgtcactgtcattttgttttctcttctctttgactagctgttattatttttttgcttatatgtatttatttattaaaatatagataaatttatttttagtctttataaatttttaaaataatggaaattattactttatcgtgatatgctatatttagttacatcattttgatagttattctaaagtaacatgtgatatgacttgttgaaatatatatatatatatatatatatatatatatataaaattaaacaatagtattttaaaaaaagtttacaaagaataaattaataaaataattactcataacagataaaaattctatttaactatatttatagaaattcaaaaatattttatcctattttttagaaaatgctaagaaaagaaaaacaagtatttgaggattttatataaaaaatcattaatttgtactccaaagtccaaacatgtattcctcttgcaatatattagtagtagctttttgaacaggagtttggcccgaacactcgagtttccgagacaaaggatacggacctgtcccatcaaagtggcgtggaaacggtgtctgtgaaattgacagttttaatggcaccaaggagtacttctgtaacaggtcaattttctttcttctttcaactttcaattcgtaaattggggttacccataaacacataagaaacgagccttttaaacaaaggtaatattctttttactgaaatatataacttaaggtaattaaatgtgaatttataaaattaatactcaagttagtgtagaaaaacaaaaccaaaacgatcaaatcaggctgcacgtacgttatcattttatacagagaaattaacaattattgaatgtgcagtcatagcgcaaatatttttattttatatatttttttcaatataagtttagcaaagggagggactgtgataccaggtatgaagccataaatttgtcacttcggaaacaaaggatattcaacaaacagaaaaggacgggacttgaacctgacccatccctcttcagatttttcttttgtaattagtttttggattcgtcctgatatattcttggaaatatttttagcagaattcaaaattttgcatacattactttgattttatttgtttcacggagtaaaaatatattcttggaaatattaacatggtaactgatttagaccattttatttatctgtctttctattctcatgcaaatgtgagaagctttattttctaaaataatttttcacttttctcttattctattttatttgttcaacatttttattttaaattaatataaatttaaaaatattccaagtaatgttaaatatttatcgaacatcttaatatttcttgtaatagtatttctaagaatattatttctgctgtaaaaaaaaggaatattattcctggaaacaaacgggattttcttttgtaaattgagttgaggtaatgtaatgtatatgagggtgtccatgtatatttttcaaaaattaaagaggttggtgtaggataagatcgataaaagtatgatatgatggatttgtgtaatttcaaaaaactttagaaatagttatcttaatttactttaaatcatattatccatccaaagatagaggagaaataagatgctagaattatgataagttgttaacgtgatatttactggatatgctaaatttatacgcttgtaaataaaagatgtaaatatcatgtaacatttgttttattgaagaatagtgatatttggacatcaataatttattaataagtcatttggacactaataacttacaaagannnnnnnnnnnnnnnnnnnnnnnnnnnnnnnnnnnnnnnnnnnnnnnnnnnnnnnnnnnnnnnnnnnnnnnnnnnnnnnnnnnnnnnnnnnaacttacaaagactcatattttttttttcttaattcttagctttgattcatcatgaaaaatggatgttgtttaatacagagttcgatcgaaaaataaataaaatcttataaaaaattatttttgtcaacgattgaactcagtactactcaaatgattcaactttaacttcaatatattaattattaattattaatactcaatttcttgattttacaaatactcaaatgcatttttttgtcacatcatatcatcaatcttatccattattaatctctccctttctatctctcttaagatgtctatatcctttaggtgtccaataatcatttctctttaacaaaatcgggtaggaatatcttatatataggcctttgtttaggagcatatttgatatggatatttatatagggtaatttaggcgtaactttttctttgccacaaacatatgcatatgtttaggacttgggagcaacatcgcaagcttcatgatgaatattggccagtgtatatatctgcactgattgatcctttgaatgacagaacaaattcgataccttttaggtatctaacataaattgtgttggcaagctaataagaatacctgttgtctagaaaaaaaaaaaaaagctaataataattttttaaaaaactaatttgttttcataattagtatgttagatacctgtattgatttagttcagtttatcattggaaattttgttgtaagtaacaaggtagaaaggcctataatattatgaatatatatattcaggaagctgattggagcaagaactttcctcaaaaatcacgagtctgaagttgggaaggttggtcgaacgctacgcagcggacgtgacttcgtagggcatggcacccacacactgtcaacagctggtggtaattttgctcgtggtgcaaatgttgaaggtaacggcaatggtactgctaagggaggctccccaagagcacgcgttgtggcctacaaagcgtgctggcataaactggacacaggagggtgccatgaagcagatattctacaagcatttgattatgccatgtatgatggtgttgatgtcatctctgcctctctcggttcgtctaatccttataccgaagctttgttaacagatgggatatccataggggcattccatgcagttgccagaaacatagtcgttgtttgctctgctgggaatgatggaccatcacctttaagtgtcacaaatgttgcaccctggtccttcaccgttgctgctagcacaatagacagggattttctcagcgacatttctctcagcaacaatcaatccattacagtatcatctttttatacttttccttaatttattagtttcatatgtttttattatgtcaacttaattaattggaatatgtgtgtatgtatcagggtgccagtcttaatcgaggcttgccaccatcgtcaccgtcgaacaagttctatcccataattaattctgttgcggctagacttcctcatgtgtctattaatgatgcgtaaggacaatttttgtttttatttcccaagcttgcttcaaatatttatatgtacttgtctcataggtgtatatgtatgtatatatgtatgtttgttggtgtagtcgtctttgcaaaccgggaacacttgatcctagaaaagtaaggggaaagatactagtatgccttcgaggtgataaattaacttcagttagtgagggtcaacagggtgctcttgccggtgctgtggcagtttttgtgcaaaatgatgagcaaagtggaaatttacttctggccgagaatcatgttttacctgctgcaagtatcagtggaacaaataatgaaagtcaaggaggtgctttcaacatcagcagcaagtaaagttcatatatatatatatatatatatatatatatatatcactagtccctttcaaatgccgtgtgtgtgtgtatatatatatatatataaacacttaattaatttctacatatatatattgctgcaggggggtgttagcttacttgagtgcggcaagaacatatataggagtaaagccagctccaataatagctggattctcatccaggggtccgagttccgtgcaaccattgatactaaaggtctataatatatacattttgttacaccaacatgacatgatgattttccttcttacaattgatgactcgtgtgagataaacttgctgtaatttgtttctttttcagccagacataactgctccaggtgtgaacgtaattgcagcttttacagaaggagcaggtccgtctaatatcgcatcagatcgacgtcggtctcctttcaatgtgcaacagggaacttctatgtcttgccctcatgtcgctggcattgcaggtcttctcaaaacatatcaccctacttggagtccagcagctatcaaatcagctatcatgaccacaggtacataagtaatagctatagtaatatatatgcatgcttaattacaaaatactctcgtatgttacaaaatataaaatgtacatatgcagcctatcatttggaaaagcattggtggtttattaattaacaactatgctcttaattaattccagctacaacactagataatacgaatcaaccgattcgtaatgcatttgatgaagtagcaactccattcgaatatggtgccggacacattcagcctaaccttgcaattgaccctggactcgtttacgatttactcaccaccgattacttgaacttcttatgtgcttctggttacaacaatgctttactcaagttgtttgccaatttgaaattcccttacacttgtcccaagtcttacagaattgaagatttcaactatccttcaattacggtgcgtcatcctgggtcaaagaccataagtgttactcgtacagttacaaacgttgggcctccaagcacgtatgttgtgaatactcacgggccaaaggggatcaaggttcttgttcgaccatgttcgttgacttttaagagaaccggagaaaagaagaggtttcaggttatactgcagccaattggtgcccgtcatgggttgcctttatttgggaatttgtcttggacagatggcaggcacagagtaaccagtcctgttgttgtgctgtaatgtaaccttagcagttagaagttgctctcagcattgttatgttatcactgtcatttgagtgtgtttgcgttttctgtttttaggctgtaatatgtgtttcctactcctgtcgtattaaactttgtctaaactaataggtaggtcatcggagctatgtttgtaatgggcacactctatcatgtatggaacctgtatctttgaaagtctaataggcattgttgagagttgagacccatatctaaataatattgaacaattttaattaggctctaatctaccaatttgccttcaccattgatttctcttctttctattttatctcgtgcagtcatgcattcatcttcagttactatggttccgaaaatagaatatctctagtctctagattagtggctgaggctgaggccaagataacctgaggcatctgcagaggaagtagctgaggccacgataacctgagcctcgggggtgcaggatccgagtaaggcaagtgaaaaatggctaccttggtgatcccaatgcaggtattcaggattttgtgaccgcagagtctccagatcggcagatccaatagtgaatggaagacagggagtggtttatgtaacatctccttcctgattgttggcttttgaggaggtgcatgagttgcttgtgccatgtcgggttgggtgcaaggttgaacttaatgatgttagagttaggggagctataggcattgttggttgttgtggaagaggtggtttgggaggcatgtgggtcggaaaaaaaaaaaggattaacttaattatttattaacttttgaagaggttgtttctcaatgcagagatatatatgtgtgtgtgtggggtagtgtgtaatcatgcattgtaacatgaaattatttacgttgttgcctgagttagaaatggaatatatgaggtcaagcggatgatatatataaagattaacttaattattttgtattttaattttagtttcatatattttgaataagttattatcacattaaaatttattaatttttttaaagtaattgaataaattatatttattaatcaatattatatttattattatatttgttttaatttatatttttttttattttttaagtttttattataatattatacctataatcattaataaaatagagaaaaatgaagattaaattatagtttgagtaaacagttatttttatttttcagttgacaaattcgtccttaaatatatcatatatactctttcattattaataacaaatataatttaacgaatagataaatttctcacattttttcacttccagaaattaaaatttagattttcatatttaataaataaatttatagcaccctacatgtttaggaaaaaaaatatttatccaaataataataataataatgataaaagcatcaagtttgagacaaagggaagaaaaactagggttggcaaaacgggcctggcctagcctgcaaaaaaatgctagctggattgataatatcaactcgcaaatcaaaagcggggcggactagcccggcttgcaaaattgggggcccaacgcggggcggggcggggcgggccagcccgctggaccaatattatttaaatattaaaattaaataaatatatttaacatattttgaaataggtatatttttttaatttatattcttttgcactctcataattaacttctaagttttaatattaaaatgtttatgataatgatactttcaaatagtcttttattactagcatattacactttgaacagtttatatccgtaaattccatttacaaatgacgtaattttgtgaattatcacatgacatcatgtatttaacattaattttaaattatttacttttatttaactttgtgttttttaattatcatatttgtattttttataattttttgtattttttaaattaattaattaatttattttttattttttaggcggactgacccgctaacccgctgacccacattaaagcgggatgaactaatatttttaatccactttacaaaagtgagctggatcaatccgccccacattttttttgggtcggccctgtttgtcatcccaaattgaaaaacacggatagtgcctctatctcgtttccaaacacacttttccttactttattctgagtttcctttatgagctatgctaggcaactttgtttatagtgataatgcacttttcttaaagtgaagaaggataatttattttaaattaatcattagcatctcaacatatcatttatattataaaatatgtcaatttttttataatttaatttttttcctttttcgttcttgtaaaaaaatgatttaatccttataaaatatttttttcttaaaacgttttaaatattatttttttgttgtgcaaaacatttattttattgttcaaattacattctaaagcatttttaaaataaaaaataaaataaacatatttaaaaggattaaaacaaaaaaaatatcaagacaaaaatgaaaaaaactaaattataaataccaaacaagtatttaagcctatgattnnnnnnnnnnaaaaataattaataagacttaaaaattttaaagcatcaacaatggtaaaataaaaagttaaaataacaatatttatgaaatggagaaaaataatttattgttcataaaaatatatgtacataatacccacaaaccttttaaaaaattgatgttattataagcatatactactttaagaatatttaccaagaccttgttagaataagcatttcttaggatatgtttaatagaaggaannnnnnnnnntatattatgcattgtatatttgatcatttaaataaaaatatgagtaaaataaaaatatttgaaacatatgaatatatttatattccaaatataatttaacaaaaactgttttaaatatagaattcatggactaatatataaacttctgcttaaaaaatctttacaacaggttagtcactaatatcttaaccattaaattatatatcaaattaatatacgataaaaaaattatcaaatcaataaatctatgatgtaacttacccattgctgagaaagttattcacctccccattttagatatttctcctctttctattgtgttacaaactgatgccaatgcattgttaggcttatatagaaagatagtatttatataaaaattgaaaatatcgtaaataaatgataggaagcctagccctaatccgaataatttatgttgtcgacctgcgtcttctacagggccacaatatgttggaagagctgcaagcaggatctttatcaaaattgtcggtggtgctgttgcaatttgcaataagtaaaatatataataacagaggtaggcattgatgatgtcaatggtgtttatgtaatgaaaataggtgaaagttacgtaagatacagagctagaattaccctatgtaagagtgaatttaaaataaaattgtatttttttttttctaaaagtgaattactctctttgattttttttctctcaaaccaaataagaaaaatatatatggttatacatgttttctttttctttttcttttcttttcttttatttgtgctccttccaaacggacccttacggagtcatagactctttttttgtgaatgacatatggtgattggtggaagatgacgtaggcaaatttcgaaagccaatagtaaagcattatgcgcaaagaccttcactaaattttataatatatacacattgtttgcgtcttatttttttttattacatcacattattttctatatttttcaactttatttggtagcatgatatatttaccaatcagtaagtatatataatgatttatttttcatattaaaatcatgcttatggaaaatggtgaaagcggagttatattagggagcgatgatagccgtatgctctttttggtagttgcgtgtatgaatacaaaaatatagttaacatccatatcacttttaatccaacttaattgagttgataataaataaacttaataataaatataaaaagattaaaaaaagaaaaaaataataaaaaaagaagagaaagataaaaaaaagaaaatgactaaaaatgaattatttaaaatataaagataataatagatttagttttccgtaaaacataattttccatttcatcttaagacgaatcgtctatcaatctatatatcacttcattaagtcttatttaattacattttccatgtaagtttcggtatatatttatctctctttatatcgaagtcttggtaataaacttttattcttaagaaaggatccaagtactgtttcattacgtgtagaaaacgcctcaaaataatagagagaaaaaatagaagaagaaaaaaaatgatagatatactaaatgatattaatagctagtgaacaatgaagagagaaagaaaagaatagaataaaattagggtaaataatcattttgtccttaaatgtgtagagtgttgataaattcgttcatgaaagatgaaaattcaattttttgtcctcaaaaatgtaaaaagtgcgaaaaatttaacattccgttaacttttatctattatcgttaatgaaagaacttatgtggcacaaagagacgaaaatgtcacaaaaatgattaccaacacggctgctgactggattttggatgaaaatatcagtaagttatcattggactaaaatgtcagtaaattttttattggacctaaatattagtaagttaccattagaccaaaatgttaataattttcaattggaccaaaatattagtaatttttcatggatcaaaatatcagtaatttttttggcaaaaaaggtcagtatgttttcattggaccaaaatgtcatcaagttattattcgatcaaaatgtcaataatttttcattggatcaaaatgtgaataattgtttattggagaaaaatgtcaataagtttttattagactaatttttcagatcccaaatttcatttaatttaagggcaaaatatagcttaagaataaatcttttctctttttttatcgttacaataataataataataataataatataaaaatcacttaaaaataaggaaacaaacataagttaaaagaaacacaataataattatattattgattaatataatcataatttgtctgtcacaatataaattattttggataaatttggataatagattgtgactaataatcatattattccctcgtttctattgattaataaccatactctttcctatcttatttataatagattttgactaattattataatatggaaaaatttgtaatgattaatacattgttacaatgattatctttggtacactggtagaatatttattttagataatttacattgtgacagacaaattatgattattaatcaatgttatgattattattatgtttcttttaacttatgtttgttttcctattttataagtgattattgtattgttcttattatgtttgtaacgataaaaaaaagaggaaagaattaccattaagttatattttgttcttaaattaaacgaaatttggggtcttacaaattagtccaatagaaaggtattaacattttcgtccaacaaaaaattacttacattttcgtccaacaaaaaattactgacattttgatctaataaaaaattgttgacattttgatcaaatgatgacttaatgatattttggtccaatgaaaacgtactgacctttttggccaaaaaaattactgacattttttgtctaatgaaaaattattaatattttttgtccaattgaaaattacgtatattttggtcaaatagtaacttactgacaattaagtccaacataaaattactgacattttagtccaatagtaacttattgacattttcatccaaaatttagtcagaaatcatgttaacaaccatttttgtaacatttttatccctctgtgtcacgtagacgctgttattaacggtaatggatagaagttgacagaatgatgattttttttgcactttttatactttcggggacaaaaatttgaattttcaacttttaaaaacaaatttatcaacgtaatacatattaaaggatgaaaatgactatttacccataaaattaagatggaatatatataagcagagccacagccatggattacatccacaccaaaacaacaactaaagatatattatggcattctccatcttcaaacatgttctgtcattattccttctctgcattttcttgcaggaacctaccaatgcccttagaaaggctagtaagcttttgccttttagttcccccgttacggttatcaataaagaatctgatggagtttttccatcatctcttcaagttccaacttcgagaatttccaaatttatattttgttaattaatgtaccataaaacatctcaccaattgtgtgctttgaattctgtgttttcagacctacattgtgtacatgggaggacattctcatggtccagaccctttgccaagtgatcttgaaacagccacaaactcccatcatgatttactggcttcttacttaggaaggtaaaacaaatgttaagttctcttaaatattattaggacgtgcgtgttaattaaaatttgataatttaacagtcatgagaaggccaaggaagcaattatgtactcgtacaataagcacatcaatggctttgctgccctacttgaagatgaagaagcatcacagattgcaagtgagcaaagactattaccattaacatgaccatgattttctactcatcttgaagccacacaaattgatataataatgtattacatgtttctattggtacagaaaatccaaatgtagtttctattttcttgagcaaagagcgcaaattgttcactaccaggtcatgggattttcttggactggaaaaaaatggaaaaattcctgcaaactccgcttggaggaaagcaagatttggagaaaatataatcatcgctaatattgatacaggtatgcttagttactctcttttttatcacagttcatcgtgctcttaattcagtttacattattttcttcttcatgaatttgtactgcaaacatattttccttttgtaaatacgtaagttgcttcttgaacaggggtttggcccgaacaccccagtttccacgacaaaggatacgggcctgtcccttcaaagtggcgtgggaaaggtgtctgtgagatcgacagttttaatggtacaaagagttatctatgtaacaggtaatttttctgttatttcatttcaaaaattgggttgagcgtgaaataacatatgtattttaaaacgttgtgattatcacggcaatggaaggtagttgttattttatttacagcttaattaatgttttatctgtataattttggctcgtattactttagttcgtttattttaaataaattcacaattttaatttaatacttaattttgcactctttttttgattaattaaattgttttttagttgttaagtgtgcaattttcaatcctcaatgttagttaaaatataaaaaaaagtatgcaaaattagaattaaattaaaattgtgaattttataaaataagaaaactaatatcatgaaaaaaatagagatcaaaatactagattatgatccataggcgattaaaattataatttagttattctattatattacgtattttgtgtttattaaggatgtgtttgaaacgaaagaaaaactaccaaagtataccagctggatagaaatataggcgtaactattctactatatgtatttttttaattttatgttaattaaggatgtgtttgaagtaaaggaaagattgtgaaagtatactagatggatatatagaaactataattttaatcaaataagaatactattttttattaaggagctcgtacacaatgactattgtggtttcatgtgaaagagtcttttttttaaataaaaaaaatgctctgccctacaaatccaaattcagacaagaacaacaataccccaatcatttttccaagagtcacaagaccaaaaataaataaatgagtatcataatagcatgcaagcaattttggagccttcagctcttctaatacacatccacaagtttaagtattttggattttttttatcataacattattattttataaaaatttatgatatattttttaaaaatattataaactatttattgctcacgttaaaaaaaattcttgaattcgccgctgttaattgctatcacatgtagccataatattaaagaggttggtgttggataagataaaagtatgatggatttgtgtaatttcggaaaactttataaatagttatcttaatttactttaaatcatattatccatccaaagatagaggagaaataaaatgctagaatctagctagacctagtcatgataagttgtcgttttttaagagtcatgataagttgttaacgtgatatttactgggatatgttaaatttacgcttgcaaataaaatatgtaaatatcatgcaactttttttaataaagaatagtgatatttggacatcaataattttttgatgttatttggacaccaataacttacagacactcattttttttgtcttaatcttttgattcatcatagaaaatggatcttctttaatccaaaattgtctaactaaaaatcattttcaccaatacttgacctccgtacaacatgaacatttaatttcaaccttaattattcatgctcaatcatttgattttacaaaaattgataatatctcaacaattcaattttaatttcagtatattaactattaatactcaatcacttaattttacaaacactcatattctctttctatcacatcatatcattaatcttattaattatttatctctcatttctttttatctctcgttaagatatctatatcctctatgtgtccaagaatcatttctctttaacaaaatcgggtaggaatatcttataggcctttgtttacgagcatatttgatatggatattttatatagggtaatttaggcgtgactttttctttgccacaaacatatgcatatgtttaggacttaggagcaacatcgcaagcctcatggtgaatattggccagtgtatatatctgcactgattgctcctttgaatgacagaacaaattctataccttctaacattcttacattagttgtgttggcaagctaataaagaatacctgtaatgatttagttcgatcagtttatcattggaaattttgttgtcagtaacaaggtagaacggcctataatattatgaatattcaggaagctgattggagcaagaactttcctaaaaaatcacgaggccgaagttgaaaagattgacccaaggctacgcagcggacgtgacttcgtagggcatggtacccacacactgtcaacagctggtggtaattttgttggtggtgcaaatgttgaaggtaacggcaatggtactgctaagggaggctccccaagagcacgcgttgtggcctacaaagcgtgctggcataaactggacacaggagggtgccatgaagcagatattctacaagcatttgattatgccatgtatgatggtgttgatgtcatctctgcctctctcggttcgtctaatccttataccgaagctttgttaacagatgggatatccataggggcattccatgcagttgccagaaacatagtcgttgtttgctctgctgggaatgatggaccatcacctttaagtgtcacaaatgttgcaccctggtccttcaccgttgctgctagcacaatagacagggattttctcagcgacatttctctcagcaacaatcaatccattacagtatcatctttttatacttttccttaatttattagtttcatatgtttttattatgtcaacttaattaattggaatatgtgtgtatgtatcagggtgccagtcttaatcgaggcttgccaccatcgtcaccgtcgaacaagttctatcccataattaattctgttgcggctagacttcctcatgtgtctattaatgatgcgtaagcacaatttttgtttttatttcccaagcttgcttcaaatatttatatgtactttgtctcataggtgtatatatatgtatatatgtatgtttgttggtgtagtcgtctttgcaaaccgggaacacttgatcctagaaaagtaagggggaagatactagtctgccttcgaggtgataaattaacttcagttagtgagggccaacagggtgctcttgctggtgctgtggcagttttagtgcaaaatgatgagcaaagtggaaatttacttctggccgagaatcatgttttacctgctgcaagtatcagtggaacccataatgaaagtcaaggaggtgcttttaacatcaacagcaagtaaagttcatatatatatatatatatatatatatatatatatatatatatcattagtcccttttaaatgtcgtgtatatatatatatatatatatatatatataaacacttaattaatttctacatatattgttgcaggggggtgttagcttacttgagtgcggcaagaacatatataggagtaaagccagctccaatcatcgctggattctcatccaggggtcccagttccgtgcaacccttaatactaaaggtctacatacattttgttaacatgtcatgatgattttggttcttacaattaatgagagagataaatttgagataattggtttctttattcagcctgacataactgctcctggtgtgaacgtaattgctgctttttcacaaggagctggtccgtctgatcttgcatcagatagacgtagatctcttttcaatgtgcaacagggaacttctatgtcttgccctcatgtcgctggcatcgcaggtcttctcaaaacatatcatcctaattggagtccagcagctatcaaatctgctattatgactacaggtacgttcattaccaaagtaatatcgatataaaatcttcatgcacaccaaatcattggcggcttattaacaactatgtttttttatcaatttcagctacaacactagataacaccaatcaaccgattcggaatgcatttgataagaaagcaactcccttcgaatacggcgccggacatattcagcctaaccttgcaattcaccctggacttgtttatgatttaagcacagccgattacttgaacttcctatgtgcttctggttacaaccaagctttactcaagttgtttgccaatttgaatttcccttacagttgtcccaagtcttacagaattgaagatttcaactatccttcaattacggtgcatcatcctggctcaaaggctatcaatgttactcgtacagttacaaatgttgggcctccaagcacgtatgttgtgaatactcactggccgaaggggattaaggttcttgtgcaaccaagttcgttgacttttaagaaaactggagaaaaaaagaagtttcatgttattcttcaggccattggtgtgcctggtcacaacattcctttatttggaaatttgtcttggacggatggcaagcacagagtaactagtcctatcgtagtgctggacacttaaaaattactctcagcattgttatgttatcgatcattgtcattttaatttgtttgcttttgttgttttttaggctgtaatataagcgtgttttctgctgatgttgcattgaagtactttgtcacaaaaaataaaaggcacaatgaacaaatcaggactgcgggatgcggtgattaaaggttaagattgttgtgcctgcatgtaatttggcatatttaagattattgtttccttttccttttgtgaaaaaacagattaaactttcactatttaactgcctttttctactcgatcttagcaacttgttcttttccttggtgtctcataaatcaaacacggagtcatgatgatatttacttgactttggagattgacttgatccaaaaatccaagtcattggtggctataattttgtaaatttaattaataggttaagttgtaaatttaatccctaattttttaattcatgttggtttttcttgttttaatggtaatatttggttttttagttttataaatcgataattttaatctccttgataaattattagtcgtgattaatagaattattaagttaattatatattaattaaaaatcattaactattaaaactttaataaataatattttattaatgtttttaatgattaataatttttatttaacatataattaatttaataattctattaattacaattattagttaataatcaaccaatgaaaccataattatcaatttataaaattaagagaccaaatattatgattaaaaattaaaaaagaccaaaatcatgaatttaggaaattagaagggatcaaaattacaatttaatctaattaataatattgtaagcaaattattgatccttgtcattcagttttgtgaatttggtagtctatgtatgaaaggaaaaattctttgtaaattacacacatacttcccttaaagttttcatttattatattaagcattctttcagtttttcaccctacaaaaatttccctaatttaaatatttaatggctctcataacagcagctacccctcactctcaaacattcttaactctgttaacagaagcgcacacgtgactgacacacgggtttttaattatattatgtttcaactttcaagaatgtcctttatttgctactgatttccagcacatgaaattgaagcactgtccaaaaatgaccatttcattcttaaaccatttatttgatctgaagttcacttaactataaacgaaaaaattagaagataaatttcaaaaacaaattaagataggcaatgaaaaacgtgaataattttttttcacacacatctgcttcccaatccgctcaaaatggcaagtttaataccatacaaattcttcaaaactggaaatttcttctgtgaaattacaagaacaaacaaaactaacgtctcagtagtttctcaatgtattagattcttttatatatctcgcagatatagggatgtcgtataataggtccaaactttagggagagttcttgtaatttatgtttgttttaaatataaactaaacgttaaggatatagcctatgttcctttcgtgtctgctcaaattgagatggtcttagggaggtaaacattgaacatcttagactcaaaatctaaagtttctctgcttaaagatggccgagtatttttgcttcttgttgtgtccttcttccttcttgttgtatcattcttttttgaatgtcctttcttattacttggcaaaactatccttagaaaggtgaactacttataaaacacactatcacgctcaaattaggtctagcacacaaagaataatgaatgtagtaaatgagtggatagaataatctgtattatatatcttgaaaacttaatcctttatatatatatatatatatatatgtatgtatttattggccttacctcttaattgaggggggcataatatgaaattacatgatgatattaatatagtattaagataagttaagctaaatttcttaactttaatggggtagttgagaaggtactagactatgctaaagggattccaggttgtaactgacaaagtattatgccatgcttaagggctgcataggtcacgccgaagaagacacgttagaatatcacaattcataaggaaaatatattatgtttactcttaaatattcatatatttatttgtaaattttttaagatagattaataaaaatatatttataattaatgtcaatctaacttaaaatatattaagaatttaagatattatttaattaaaattttaaaaataaaatttaattaaaatacactgtcattcatatatctatttatatataaaaatattatcatatatgacaattttttaataagtaatttaaaaattatatatagaatgattttttattaatatgatattaaaaatttatattgacggtgaatgaaaattaggctcttaaaaaaatatattttttggcttaaatatatttttcatttatgtaatatactattttttatttaattctttataattttgtttttcaaaatggacattgtaaaatttcctttatagttttagtctttgttattttattttagtaattataatgcactgttttttgttttatttcttataatatttatttatcttgaaatattctctttgaaaaatatttaataagaactaaaagaaaataatatacatattacaaggaaaaataaaataaaatcaatatattatcatgaaagctgacataaatcatgaaagttaatcaattcactcatacacatttaattcacaaaaacatcaatcaacaagagtttgtattcaatcaagaatcataaattcaatctcaatcatacgatcgattaaatcaaaacatgctcaaacagtctcatcaaaataactatctattatgcaaaattaaagaaaccgtaaattgcagaatttaaataactggagtgcaaaaatttaaagatagatgcagaaaataaaataaggaacgaaaaaaaaagaataaatctagaaaaaagaaaaagatggctttaatcctgtgtcgaccatggattccacgctccctaagtcggtctgacatttgcaatgtaatcatcatcctctcaagcctccgcaacatctatgtcaccaaatggtccattcgcagctccagagacaacactcccccaaagaagaaggcttgtccccaggtcaagcaactcgcttgaggaagtcctctagagtcgtgatcggctgatggagaaagagttgatgaaggctctgcatcaggagatattgttcgtggggaaggctggtcagcatggaaagaagtggctcctgaatacgtggtggagaggcagaccctcgttgttttctagtgaccatctttaaaggatagacaaaaatgagacaaaagaaaattaaattcacacaaaaataaaatatttcacaaaaatagagaaaaaaggtaggaatgttggcttgcctttcagtaaatgcttctttaacatcactagcttgactagcaaaatgccttcaaggtggcatgaaggtcacatagaacacaccttcctcttgcattttcgcttcttagctagagacttcatgaaaatcatgtatccatggaacgactttcatatcattgcaagggaagtgttggtgatcaaggaaaacatggcactgctgaatttatcacattctccatacctttctttcttgccaatcaattaatgaggagaggtattgacttggagatgacttttttgttgaatttctacgtgtgagcactgctcccattgttgttgtgttctttcttcacttttcttttttttttcttcatctttttcttgtgaatcatgctagctcttctacaagattctcctcatgtgttgtaagctctacaaaattttcttcctttgtgatcaaaaaagacattttagccacttcttttactagcttaccaacttgaatctccagattttgaattgagttttgattggctttgaatctagcttgggaagtttccatgaattgcataaacacattcccaagattagagattctttcttcttcatattgattgaaagggtataactattgttcccaccaagaatttttcatgaagtaaatatgacaattatcattgaaatgctctcttccacaaaaatcacaattgataggttgtgggtgactaatccctatgaattgcatcaacagattatcaagattaacgatttttttcttcttcatattgattgtaagggtgtaactcttgctcccaccaagaattttccatggactaaagataacaattatcattgaaatgttctcctccacaaaaatcacaattgataggttgtgggtgactaacccctatttacatgattttaagatgctcagacaacatctctgattggttaacaagaagcctttgttgtctgagcacactactccaaatatcttccatggatcatattcttcaaaggtttcagcatgtaagcatagactcaaaagaaaaagataatttttttaaaaaataattttatttttaaaaataatttttgtctttaattttttttcaaaatttgtttaccaaaagggaaaataaaataaaataaatgctgaaattctataagataaattagaaagatattaaatctaataagataaagataaaagataatataaaataacaatctaacaataaaatctagaaagataataattatgataattttctaataaatttaaagataaatacataatctaatccctaaaagataatataaaataaaatctaaaggatttaaattttgaaattcaaaaaaaaaatcttgatgttaaaaataaaattaaatgcttaaaacaagggtatacaaactaccgaatacaaggaacaaattccccgataatggggtcaaaaattacttattcgacaaccgtaccaattcgtctaaataataataaaatgataagaccgagtgtcgagtccacatggactttgattatactcaaaatttgtatggtctaattgtaagcaattaacataataattttgggatttgtagtcttgcatgtgataatataagtaaatataaatttaaaataaaataaattaagaaacatattataagaaagagaacacaagcacttgaagatgtgatttgaaggttgatgtaggcttatgagatatgttgggtgttaagcctaccaaaactactcttgatgcaatgttaatgatttttcactatttaatattatttttcatattatcttcatctttaatttattctaaccatgatctctcatatgaaagaacctaaattacctaatttcaatcatgatccctcaacaagctacatcaaataatttataaatcctcataacattacatgcatatgaatgaccaaaccacaaatatgataatagtttcataaaagaataataatatgaaagtaacactaaatatagatagtaataactgttacatcaagagtgtttggttgctaaatcccaacaataagtgatttagcttctcattgacatcatagacttacaaaaacaaaagagaaaaacaattgatgaaagagagtgaaaaaaattggtagaacaagggacataaatccatttatgtagaatgaattcttctttcctttgtgcctttggtttctctatctgacttccctatgactgctcccatttttataatcaaaactttgtttaattagactttttttttatattggtgagacgctaggccgatgtgtgcgcactaagtccatatcctcaatcaatctttcaagtttttaatgtgtaatcctaaaaaaaaaaatacaagtacactacaaataaactaattttagtatttcttgaataaaagctcataaaaagttgaatttctatattgcaatcacaaaagaaacaataaaagaggaaacagaagataattaatatataatttaaatgcacaatttccttataaatagcaattatcaatggtacctttagtgttagctaaacaaacgttattagaattgttccttgtttttaggcaagaattgttctttttataaaccagcaaaaataataaatatnnnnnnnnnnnnnnnnnnnnnnnnnnnnnnnnnnnnnnnnnnnnnnnnnnnnnnnnnnnnnnnnnnnnnnnnnnnnnnnnnnnnnnnnnnnnnnnnnnnnnnnnnnnnnnnnnnnnnnnnnnnnnnnnnnnnnnnnnnnnnnnnnnnnnnnnnnnnnnnnnnnnnnnnnnnnnnnnnnnnnnnnnnnnnnnnnnnnnnnnnnnnnnnnnnnnnnnnnnnnnnnnnnnnnnnnnnnnnnnnnnnnnnnnnnnnnnnnnnnnnnnnnnnnnnnnnnnnnnnnnnnnnnnnnnnnnnnnnnnnnnnnnnnnnnnnnnnnnnnnnnnnnnaaaaaaaaaaaattcaagtacgaaatcgattagaggtcaagttccctacgtgaacagtaatggtgctagttgtataaacaatctggagagggtattatttgcgtaattattttttattttgtattatttgagtaaaaaaattaattgaatgatttcttatttattgatagtatacaaatctttatttatatgcaatagaatctttatttacataaataaatttgttaaccttttacatgaatgtttttttcctctatttatatttataaaaattaaaaaatgtctctttgtcctttttaaaagaataataaacataaaaacgttcaacagttttaagcataattataatttacaagtggggaccacaatttttttttggatttggatgcattaactttacacagtagtaaaagtcactatcactttgactattagattaatcttatcatccaaatttcactacttgttttaaaagatattttttgatttattttttactttagttattaatttatcactttttactttaaacctataaaaaatacaactaagtgtgtagattaattgttacgaggtatttcaatttagcacatggttgaggagaaattttatcgccaataaactataaggatcctatctacttcaagcatgattacatttgatgaaacataccagtggtctggataaaaaaaagtcagaaattttgtagcatgctgctaggaatttctttaattttctaaatgatataagagactatggattaaactgaaataattttgtactagttagtagttaatctataccctcaacaatatttttatggttttaaaatatacaagatataaaaactaaattaataatcaaattaaaaacatctttcaaaacaaaatcgtaaaatttgaactatcaaattaatctaatattttaaaatgagattaaaaacatgtttggatataagtttctctataaatatttttagaagaaaaaaataagaaaaaaaataaaatgagtttcttcataaattaaaatatattttttattaactaatttgtagatgtcatatcatcttttaaaaaagttatattaatgagcttctaaaaattaactaattgagaacttatttatatttatgaaaaaatttatatcatttttttctttaaaaatatttctaaaaaaacttagccaaacatgcctttaagtaattataaaatgtccaataaatccattccatgttttctgaggctacactcggtacgtaatttcacattaaataggagcagtttttctgctatttcattacactatcatctactagctctgatcgaggatccatcatcttctgctattccataatcacccaatagctcaaatatgatgttctctaagctttcattaattcgtctaattctctgttcactcttaagcctccactcctcccaacttttcaagtttacttcttttgcctttgctgccatcactgctgaaaaccatgagagggaagcagctgctctacttgggtggagagtgagtcttgacaaccaaagccaagcttctttgtcatcatggtccagtgctgtaagtccttgcacgtggaaaggaatcgtttgtgacgaatccaactatgtgaccgctataaatgtggcaaatctggggctaaaaggtactcttcacaatctcaaattttcatcttttcccaagctgctaactctggatattagtaacaacagttttaatggaatcattcctcagcaaatttctaacttgtctagagtttctcagttgaaaatggatgttaatctttttcatggttcgatccccatttccgtgatgaagttggccagcttgtctttgctagacttaacaggcaataaactttctggtaccattccatcaattagaaacttgacaaatttagaacaccttaggctcgcaaacaatagtctctctggtcccatcccaccctacataggagagttggtgaatttgaaagttcttaattttgaaagtaatagaatttcaggatcaattccttcaaatattggaaacttgacaaagctcggcatattattcttaggcgataacatgatctctggatccgttcccacctccattggaaacttgatcaatctagagtcgctggacctgtctaggaatactgtttccggagttattccttctacccttggaaatttgacaaagctcaattttttaatagtgtttaagaacaaacttcatggtacattaccaccagcactgaataactttaccaaactccaaagcttacaactatctacaaatcgtttcaccggtcctttgccacaacaaatttgcatagatgggtcactgagaaaatttgctgctaatggtaattctttcaccggtccagttccaaaaagcctgaaaaattgctccagtcttaccagagtaaacctatcaggaaatcgcttgagcggaaatatctcagatgcttttggtgtgtatccagagttaaacttcgttgagctgagtagcaataatttttatggccacatttcacccgactgggcaaagtgtcctagtctcacaagccttaggatatccaacaacaatttatctggtggtatacccccagaactcggccaggcacccagcttacaagtactagtcttgtcttcaaatcatctaacaggaaaaattccaaaacaacttgggaacttgacctctttgtttgatctatcactaggcgacaatgaactttttggcaacattcctactgaaataggtgctttgtcccgcctcaaaaatttggtgcttgcagcaaataatttaggtggcccaattccaaaacaggtgggatctttactcaaattagttcacttgaacttgagcaacaacaaattcacagaaagcattccttcatttaaccaattgcaatctcttcaagatcttgaccttagtaggaatttgttcaatggaaaagtaccagcagaacttgcaactttgcaaagattggaaactctaaacctctcacacaacaatctctctggagccattcctgattttaagaatagcttggcaaatgttaacatatctaacaaccaattggagggttcaattcctaacattcccgcctttcttaatgcttcatttgatgcattgaaaaataataaaggcttgtgtggaaatgcctccggtttggtgccttgccaccccctacctcatgataaaatgaaaagaaatatcatcatgttgccattactcctttctttcggcgctctatttctattattattggtggttggaatttcgttttgtatttgctaccgaagagcaacaaaagccaaaaagaaggataaagaagatcaaaccaaggatcattattccctttggagttatgatggaaaattagtgtatgaagatatcattgaagccacaaaggggtttgatgacaaatatctcattggagaagggggaactgcatctgtctatgaggcaaaattaccctcgggacagattgttgctgtgaaaaaacttcatgctgcacccaaagaggaaacaccagattcaaaagctttttcaactgaggttaaagccttggccgaaatcaagcaccgtaacattgtgaagtcacttggatattgtttacatccacgcttctcctttttggtttatgagttcatagagggtggtagcttggataaagtactaaccgatgatacgcgtgcaacaatgtttgattgggaaaggagggtgaaggttgttaaaggtgtggcaagtgctttgtaccatatgcatcatggttgctttcatcctattgttcaccgtgacatatcaagcaagaatgttcttatagatttggattatgaagcccgcatctctgacttcggaacagctaaaattctgaatcctgattcacaaaatataacagcgtttgcaggcacatatggatattctgcaccaggttaggccatttttgttcttaagaatttaatcctatatatattattgtttcaataataagtcctgctacttgctttataatactatttttattattttgatgaattacagagcttgcttatacaatggaagtgaatgagaaatgtgatgtcttcagtttcggagtgctttgtttggaaataataatgggacagcatccaggagatatcatttcttcattgttttcatcatctgcgtctaatatgctattaattcatgtgttggaccagcgactacctcagccagtgaagccaattgtggaagaagtgatcttgattgcaaaattaacatttgcttgcttaagtgagaatccacgctttcgcccaagtatggaacaagtgcataacgagtttgtgatgccaaaatcatcttctttggatccactccccatgatcacacttggtcaactatctaaataattgaaacttgttttctggtgtgttgtatgttttttagttttttggtttacactgtaattaagcttttcgtgatattaatgttattctcttgcatgttttgtatgtttgtgatggagtgctttgtatatttcttctgttctgtgaagacttggaaaataatggaaagttgcctatgtcttttgtaagatcgaataaataaagtgtgatttttgaagggagacagtcatgtttttggtctttataaaataaataaagttgctttacataaaaataaataaaaaagctactttatcaaaagaaaaaagtaatgtttttggtaagataaggatattttgactgtatatttctttgagagttatttggcgttaatggttagccactcgatgaagtatattgaatttaattgaagacactcccaagtcccattatatattaggactttagtaatctacaagaaaactcgtataaggatattttgaagaataaatttgaatacaaatgttatatatttcacacaaaactattaatcggatcattttattttatttttcaaatagaaaaaaattaagattatttatgactgatatctgcaacaaagtttaatcaattaaacattttattaaatcaaatgtcaattgattaaaatatttatttttataaataatgttctattatgaattttgataaataaatgttatatgaaattttcataaaatgagaaattaattaaattaaattaagtagtttgattggttcaaaattaaaagctttattcattattataaaatataagaaactaatatatttaagagattaaaaacatatttaagattaatatgtttgtaaaaataagaaagacaataaaaatattttagtaaaatagatttctaataaatattatgatattggagttattatttttattagcttatgtgaaaaaaatcttatccctaccctagtatacatgtcatgtcgatatctcgcggttgttacaaaaggaagtcgttcctctccaaaaaaaagaaaaaaaaaaaggaagaagaagaaggaagtcgtttcttggggtccaccaaaagaacgaatgaagttgtctttcgataaatcaatctgagtttttgtgccttattcaaccaatcaatctaagaaaaatataactccatttnnnnnnnnnnnnnnnnnnnnnnnnnnnnnnnnnnnnnnnnnnnnnnnnnnnnnnnnnnnnnnnnnnnnnnnnnnnnnnnnnnnnnnnnnnnnnnnnnnnnnnnnnnnnnnnnnnnnnnnnnnnnnnnnnnnnnnnnnnnnnnnnnnnnnnnnnnnnnnnnnnnnnnnnnnnnnnnnnnnnnnnnnnnnnnnnnnnnnnnnnnnnnnnnnnnnnnnnnnnnnnnnnnnnnnnnnnnnnnnnnnnnnnnnnnnnnnnnnnnnnnnnnnnnnnnnnnnnnnnnnnnnnnnnnnnnnnnnnnnnnnnnnnnnnnnnnnnnnnnnnnnnnnnnnnnnnnnnnnnnnnnnnnnnnnnnnnnnnnnnnnnnnnnnnnnnnnnnnnnnnnnnnnnnnnnnnnnnnnnnnnnnnnnnnnnnnnnctaaatcagatgcaatattattattttttttttgtgaaaaacaggagaaaaccccaagaacactaaaatccgcaagaaaaccccaagaacactaaaatccgcaagaaaacacggtcttacaactttcagccaaaacggtattatacaaaaaaggaagggacaaaatcaaataccttaactgcctaatcaaaccagaagcaatttgcgattacagctcaaagaagagtcggacttatacacgtccctgttccaaaataaacaagatcatattattgcctgagctagaaataatgggtagatgaagattgaaggggttaagagtttcatccttaggatagtggtgcaactttggtgactttcaattgtggatttgcattatgggaattgtgacagaagccttttttttttttaataaacaccttcattaatcattatagaactgtgtttgataaagtttgacatttggagagcatttctcttaatttttaggctttggagaatttcatagtagttttaaaaattcttaaatcattttttttaaaaattaaaactctcaaacaagaaggtgtcaccacctaaatttttttcttcattcccatctcctttaaaatctcttttccaaacaaagtcttaaggtttactctgaatttatccgctaatataaagaaccgcttattacaaataatgtacacactatttccaaaattcttcaagatacatagtgatgtcacacgggaaggattcnnnnnnnnnnatatatatatatatatatatattacaagaactaaagaaaaataacaaggaacaaaatcaataaaaagaaattccatagaaatcattttgaaaaaaacaattttttaactactaaaaccataaaaacaatatatataccggaactgaagagatatttaagccataaatttatatttaacttcattgactaatatgtctattcaatttcgcttaacaatcaaaccatatatattaatgcttatgagggaatcatatttgttttggaagatatgctcttgaagcacttgaaccagcttggatctagacaaaccaattacaataaaacctactaaatcacgtatgggtttagggaaatgatattttaaattataaacattatattaatatataaatattattaaatacatatttgaatattaattaataatattagtactaaatttacttcacatataatatttattaaattgaaaaaaatacatggcctataatttcctaattatttagtgataactaataacatcaatcatgtggtgataaatgataacaccaccataactcataccaatagttataatttattatgggtctagctcaattatatttgagtaaaatttttgtaaatcttataatattagtcttcaataataaggaataaaaaaataattataatgttgattcaattttctgatagattttctactataaaacaggtaactatgtcactcttaattatgtatttgcactgaaacatatccctaaattaatcattggagggaaccttgtaatgcaagttccgaacacttgagaaatctcgagttctcgccggcgagggttttattatttgggaatattttatttcatttattatcatttttggatctatttcaaataattttctaaaaagataagtcataataggtattagacttctgagttaaaaatcataataaatattatgacttataatttttttaactgaagtcgtaaaaaaatttatgactttaatttaatttttttaaatttacaattttaaaattgtatttttttttacttttaaaattgtaagttataaatttttttacaaacttcagttaagtattgttttaagagttacgactttgaagttatatgatttttttctaaattatgtatttctattttatatttttacactttaaaaattagtattttgtttttttttgtttatcttttttaaaaaattgtaaatatctttttaatttagttatttaaaaataaaagtatttttaatatgttttatatattttctataaaaattaaaaaaaaatgaaaaatatataaaaaaaacttagtatatgaatattaattcattgaagtcgataattgattcttatctgggtagcaattcacccaaaaaatcttatccgtgtagcaactgccgttaaattgtttatacggcatgtgatgcacacttttcacacgctacaggagacttctttatttttcaaaaaaattatattcaaataaaagctaactggtttaggatttttcttttttaaagaaagcaatcatctttatttttttaaaaaataaatccttcataaaagctgaaaacaaaatattagctaatcaaaatgcattgcttcaacatatgcttccttaattccaaacaggtaaagcactacttcgtctccgatttgaacgttattaagtaatagtagagttgttggattgaaaattaacaagtctgctcttagttctcaaccggtgaaacatgtgattattatctcaaagtctcacttaaaattgaaccgtaaagcataaataggatgtttaacaaaagaataaaattgtgaacgagtaaagttagattttgatgtaacatttcaccaaattgggtcaattgtcatagtctaacaagccttaaaatgtctagcaacaatttatccggtggtaaaccgccagagctcggccaggcacccaaattacaacaacttcaactctcttcaaataaaattagtggaaaaagtccataaagttttggtaaattgaccctgttgtttgaactctctttgagtcacaatgaattttctaactacattcccacagaaataggatctttgctaaaccttcaacatttgaaacttgcagcaaatagtctaactggtccaattccaaatcaacttggacgactgctcaagttaattaattaacttgaatttggcaataataaattatctttgtggcaacttgttaaatggacaaatactagatcacttggaaagttgcacagattggaaattttgaatctctggcaccattccatccaattttaagaatttgttgagtttgacaaatgttgacaccaacaactaattagagggtccaattcctgataatgttgaaggtaacggactaacgactatggtactgcaaagggaggctccccaagagcacgcgttgtggcctacaaagcgtgctggcataaactggataccagagggtgccatgaagcagatattctacaagcatttgattatgccatatatgatggtgttgatttcatctctgcctctctccgttcgtctaatccctatactgaagctttgttaacagatgggatatccataggggcattccatgcagttgccagaaacatagtcgttgtttgctctgctgggaatgatggaccatcacctttaagtgtcacaaatgttgcaccctggtccttcaccgttgctgctagcacaatagacagggattttctcagcgacatttctctcagcaacaataattccattacggtatcacctttctatatttatccttaatttattagtttcatatgtttttatcatgtcaacttaattaattggaatgtgtgtgtatatatcagggtgccagtcttaatcgaggcttttaacaagttctatcccataattaattctgttgaggctagacttcctcatgtgtctattaatgatgcgtaagcacaatttttgtttttatttcccaagcttgcttcaaatatttatatgtacctgtctcatagatgtatatgtatgtatatatgtatgtttgttggtgtagtcgtctttgcaaagcgggaacacttgatcctagaaaagtaaggggaaagatactagtatgccttcgaggtgataaattaacttcagttagtgagggccaacagggtgctcttgctggtgctgtggcagttttagtgcaaaatgatgagcaaagtggaaatttacttctggccgagaatcatgttttacctgctgcaagtatcaatggaacaaataatgaaagtcaaggaggtgcttttaacatcagcagcaagtaaagttcatatatatatcactagtccctttcaaatgtcgtgtgtgtgtgtgtgtatatatataaacacttaattaatttctacatatatatattgctgcaggggggtgttagcttacttgagtgcggcaagaacatatataggagtaaagccagctccaataaaagctggattctcatccaggggtcccagttccgtgcaaccattgatactaaaggtctacatacattttgttacaccaacatgacatgatgattttccttcttacaattaatgactcatgtaagataaacttgccgtaatgtgtttctttttttagccagacataactgttcctgttgtgaacataattgctgcttttaacacaaggagcaggtccgtctaatattgcatcagatagacgtcgatctcttttcaatgtgcaacagggaacttctatgccttggcctcatgtagctggcatcacgggtcttctcaaaacatatcatcctacttggagtccagcagctataaaatcagctattatgaccattggtactaataattgaaattatacatttgaattacataataattttttaaaattatataatagttatattcttttttaatgtttttttttattgaaacacataaatttagttttttttctgaatttttattcaataaatactaaaattagttgatttataatgtattagttgtattttctttgtatgattacataataaaaacttgaaatatggattgagaatatgaacttagcgtgcacatatggacttagtgtgtcaccaatataaaaaaaagtatagttaagtaaagttttgattgtaaaaaagagagaagagaaaaatcatctgaagccagaaacctaagacacaaatgaaagaaaaattcacacaacaaaagttgacttatgtccctttgttttctggtctttatccattcttttttattaattattgtttccttttgtttttgtaagcctataatcagaggcgaatttagaaaaataatcaaaagagacactagtggtggactcaggaaaaattatttatgtctgcataagaatttttttttgtaaaaaaaattaaaggaacaaacaattataaataataatttaaaggaacaaataaatagtcagaccaaattattgttctagattaaatagaacaatgaaaacaattcattttgtactactagtctacatctcaatcaccttctcatttgagcacaatagtacagtgctaaatcaaacactaaaaaactaaaaattgtggcagacagatactaaataaaacactaaagttattccatctcagttcacaaatcacaataatttagtttgtaatataaagcactaaaaataatatgtccagtaaaaaacacactcacatagaccagtttgtatttaatagaaaaataaaaaaaatattgataatttaataggaaaatttaaggaggatacttcccgcaatcatgtacctaggatcccccagtgcctataatgacaaagagagactaaatcctacttggagtcgagctatcaaatcagcaattatgaccacaggtacattggtattagctatagtaatatatatgcatgcttaattacaaaatactatcatatgtatgtagcatatcatttggaaaaacattggtggcttattaattaacaactatgctttttatttatttcagctacaacactaaataacacgaatcaaccaactcggaatgcatttgataagaaagcaacccccttcgaatacggcgccggacaaattcagcctaaccttgcaattgaccctggactcgtttacgatttacgcaccaccgattacttgaacttcttatgtgcttctggttacaacaatgctttactcaagttgtttgccaatttgaaattcctttacagttgttccaagtcttacagaattgaagatttcaactatccttcaattacggtgcatcatcctgggtcaaagactattaatgttactcgtacagttacaaatgtagggcttccaagcacgtatgttgtgaatactcactggccgaaggggattaaggttcttgtgcaaccaagttcgttgactttatttgggaatttgtcttggacagatggcaggcacagagtaaccagtcctgttgtagtgctgtaatgtaaccttagaagttagaagttgctctcagcattgttatgttatcactgtcatttgagtgtgtttgcgttttctgtttttaggctgtaatataagcgtgtttcctactcctgttgtatgaaactttttctaaactaataggtaggttaaaaattttgaggtattgaactttgttgcattggagctatgtttgtaatgggcacactctatcatgtatggaacctgtatctttgaaagtctaataggcattgttgagagttgagacccatatctaaataatattgaacaattttaattaggctccaatctatcaatttgccttcaccatttatttctcttctttctattttatctcgtgcagtcatgcattcatcttcagttactttggttccgaacatagaatacctctagattagtggctgaggccacgataacctgagccttggggctgcaggatccgagcaaggcaagcgaaaaatggctatcttggtgacaccaatgcatatattcaggatttgtgaccgcagagtctccagatccaatagtgaatggaagacagggagtggtttatgtaacatctccttccagcttgttggctttcaggatgtgcataagttgtgccatgtcggataaatggctgctgaaagtttgattggcaggttggtgcaaggttgaactcaatgatgttagacttagaggagcctataggctatgtagcatcgataccgatacggcgttttcgatacgttctcgatatggaacttcgatacgtttttcaaaaattctaatatttcgatacgttcccgatacgtcttaatattaaatattattttatatatatagtgtatttcatattaataaaatataataaaaggaaattgatagcaataagtaagcccttctccttcttacaaaattgataaaaatatggtaatggtaattgcaaaaagggattctatatttttattcatacaaaattgataaatatcttaaccaatgtgtggacatggagtgctactaataaaaaatgatttatgtttgacttcattctattatgttaacaaaacaaaacataatcatatttaacataatgtaaaatgatttaatatttgcttttaaatagaaagaaaaaataatgtaaaataacttgaggagaatgtaaatgatgtaaattaacaaaacataatcatatttaaaaatattaatatttgcttttaaattgctaaaaacagatatgttaaaataacaaacaatttgagggctgagaaaaaaaaactactaaaataaaatgatttgaacagggagagagttacaaattgaatggtaatataaatgatgtaaattataagcagctgtggtaattagaaattaatgaggtaaaataaaatgaagcagctagagactatagtgaatgaggaaaaaaatgaggtaaaaaaattcacaagcttcacttgctgttatgggcttacggtgaaggaggaagagcagctacagcacggcagaggagcagcgtggcggaggagtcgcgtgtcggaggagcagcgcggcggcagcggacacggtgaagagtggattgaagagcagtgcggcggcagcaaacgcggaagacagctatggcgggagcggcggaggagcacaaaatggacgaacaaaaaaaaatcgaagaggtaagctatgtagcacaaatcgaagcatagcaccaattttgggatttttttatttacaaaaataccccttctccttttgatacgtaaaatcccgtttttcttgcgaacccgtatcggtcgggtgtccgatactttgagaaaactttttttgccgtatccgtgctacatagcctataggcattgttagttgtggtagaagaggtggttcgagaggccatgtgggtcggaaaaaaaaaaagaaaaaaaaaggttgattaagatatgctctaatacaatatagaattaccatataagctctggttgttgtgaacaataatatacaaatatttacttattttaaacatttcaccatatgttttatttatcttgtctctttctatcatatcataaatcatataatacctatacttttcttctttttttttttctctctgagtttcttgtagcataatggatgtccaagaaagatttttcttagttttattgatttgcaaaggttatcagggatatgtatttataacagtacagcagagagtttgttacaactaaataaataaagactaaagagatttgaatttaaacaagtcctcacataattaatcatattttatcagcagaatttgaattacaaaatgataatagcaagcatttgaatatcagttggagcagctggaatatgttagtactcctacatagatgactgcatagagatctcatatgactaaaccattcaaaagagcattttcaggtgccaataggatttaaactcgaactagatggcggttatttcctaattttgagatcgtgaatcctatcttcctaatcaccaaattctgtgataatatcaatacaagaaactcttagtataatgttagccaaaagtggacgctaaatcacgaaagctgacataaaattgattagtgcagacttcattttttaccttacaccttattagaatgaatctgtcttcttttaggcacgaattgttctttttataaaccagaaaaaaataataaatatataaaatgactttcccaattaatttctcaacatcaaaataaaataaataaataaaattcaagtgagaaatcgggtttgagaggtcaagttctctaagtgaacagtaatggtgctagaagtacgtataaataatctgaaggggtattatttacgtaattattttttattttgtattatttgagtaaaaaaaattgactgaatgatttcttatttattgatggtacacaaatctttatttatctgcaaaagaatttttatttacataaatatatttgttaacattttacatgaatgttttttttcttcaatttgtatttataaaaattaaaaaatgtcacttttttcttttttaaaagaataataaacataatgtataactataatttacaagtggggaccaaaactgtttttatttatnnnnnnnnnnnnnnnnnnnnnnnnnnnnggcttgttttaaaagatttttaaaacaaattaatttttactttagttattaatttaacatttttttactttaaacctataaaaaatactactaagagtttggattaattgttacgaggtatttcaatttagcatatgattttgagaaaaaaactttattgtctataaactataacaattttatctgtcacaacatgattgcatttgatagaacataccaatggtgtggataaaaaaaatgtcatattttgtagcagtgttgctagtaatatctttaacagtcttatatttatcaaacattttctgacaattttctaaacaatataaaagactattgattaaattgaaataattttatactagttagtggttaagctacaccctcaacaatatttttatgatttcaaaatatacaagatataaaaattaaattagtaatcaaattaaaaaacatctttcaaaacaaagtgataaaatctgaactatcaaattaatctaatagtttaaaataagattaagaatctttttagatacaagttagtggtttggagaatttttttattaaaagtatataataagttctgaaaaatacttttattataaaataattctaaatttcccaataaatccaatccgtattttctgaggccacgctaggtacgtactttcacattaaacaggagcagttttttctgctatttcattagactactagttctgatcgaggatccatcatcttctgctattccataatcacccaatagctcaaatatgatgttctctaagctttcattaattcgtctaattctctgttcactcttaagcctccactcctcccaacttttcaagtttacttcttttgcctttgctgccatcactgctgaaaaccatgagagggaagcagctgctctacttgagtggagagtgagtcttgacaaccaaagccaagcttctttgtcatcatggtccagtgctgcaagtccttgcacgtggaaaggaatcgtttgtgacgaatccaactatgtgaccgctataaatgtggcaaatcttgggctaaaaggtactcttcacagtctcaaattttcatcttttcccaagctgctaactctggatattagtaacaacagtttaaatggaattattcctcagcaaatttctaacttgtctagagtttctcagttgaaaatggatgctaatctttttcatggttcgatccccgtttccgtgatgaagttggccagcttgtctttgctagacttaacaggcaataaactttctggtaccattccatcaattagaaacttgacaaatttagaacaccttaggctcgcaaacaatagtctctctggtcccatcccaccctacataggagagttggtgaatttgaaagttcttgattttgaaagtaatagaatttcaggatcaattccttcaaatattggaaacttgacaaagctcggcatggtatacttagccgataacatgatctctggatccgttcccacctccattggaaacttgatcaatctagagtcgctggacctgtctaggaatactgtttccggagttattccttcttcccttggaaatttgacaaagctcaattttttgctagtgtttaataacaaacttcatggtacattaccaccagcactgaataactttaccaaactccaaagcttacaactatctacaaatcgtttcaccggtcctttgccacaacaaatttgcatagatgggtcactgagaaaatttgctgctaatggtaattctttcaccggtccagttccaaaaagcctgaaaaattgctccagtcttaccagagtaaacctatcaggaaatcgcttgagcggaaatatctcagatgcttttggtgtgtatccagagttatacttcgttgagctgagtagcaataatttttatggccacatttcaccagactgggcaaggtgtcctagtctcacaagccttaggatatccaacaacaatttatctggtggtataccgccagaactaggctgggcacccatgttagaggaacttgtcttgtcttcaaatcatctaacaggaaaaattccaaaagaacttgggaacttgacctctttgtttgatctatcaataggcgacaatgaactttttgggaacattcctaccgaaataggtgctttgtccctcctcgaaaatttggagcttgcagcaaataatttaggtggcccaattccaaaacaggtgggatctttactcaaattagttcacttgaacttgagcaacaacaaattcacagaaagcattccttcgtttaaccaattgcaatctcttcaagatcttgaccttagtaggaatttgttcaatggaaaagtaccagcagaacttgcaactttgcaaagattggaaaccctaaacctctcacacaacaatctctctggagccattcctgattttaagaatagcttggcaaatgttgacatatctaacaaccaattggagggttcaattcctaacattcccgcctttcttaatgcttcatttgatgcattgaaaaataataaaggcttgtgtggaaatgcctccggtttggtgccttgccaccccctacctcatgataaaatgaaaagaaatgtcatcatgctggcattactcctttctttcggcgctctatttctattattattggtggttggaatttcattgtgtatttattatcaaagagcaacaaaggccaaacaggaggaggctaaagaagaacaaaccaaggattatttttccatttggagttatgatggaaaattagtgtatgaaagtatcattgaagccacagaggggtttgatgacaaatatctcattggagaaagtgggtctgcatctgtttataaggcaaatttatccacaggacaaattgttgctgtgaaaaaactacatgctgtacccaacgaggaaacactcaacctaagagcttttacaagtgaggttcaagcctcggcagaaatcaagcatcgtaacattgtgaagttaattggatattgtttacatcctcacttctcctttttggtttatgagttcctagagggaggtagcttggataaagtactaaacaatgatacgcaggcaacactctttgattgggaaaggagggtgaaggttgttaaaggtgtggcaagtgctttgtaccatatgcatcatggttgctttccttctattgttcatcgtgacatatcaagcaagaatgttcttatagatttggattatgaagcccgagtctctgactttggaacagctaaaattctgaagcccgattcacaaaatttaacctcgtttgcaggcacctatgggtatgctgcaccaggttaggtcctttttgttattaagaaatcaaaactatacttgtttcaataataagtgctgccacttgttatatgatactattttcatatttaatttgatatattacagagcttgcttatactatggaagtgaacgagaaatgtgatgtcttcagtttcggagttctttgtttggaaataatgatggggaagcatccaggagatctcatttcttcattttttacatccactggaacgtcatcagcttctactttgctgttaaaggatgtgttggaccaacgaatacctcaaccagtgaagccagttgacaaggaggtgatcttgatagcaaaaataacatttgcttgcttaagtgaaagtccacgttttcgcccaagcatggaacaagtgtataacgagtttgtgatgccaacatcatcttcagtgaatttattctccatggtcacacttggtcaactcgtagataattgaaccttcttgtttcctgcctgttgtaagcttttttattgctttaactagtgaacaatctcagcacggtttaccgtagactgaatgtagatcagtaatgatcaaaacagaataacatctgtgtgaccgtgtctcacattctctttattcctcaactcactgtgttgttgttatacatactgtttcttgatttctatatgctgtaatcgtgttagaatcatataaattgcattagatttacattggctatactctccacatctcaattacacaattacataatctatttgtgtctataagttttcaagaaaataattttgggactgatttttagaaattcagttctccctttctttggattctttaccatttgtctaataacatatattctaattcatatagtcttcaaaatatccatatacgagctttcttgcggatatatttagccctagtcctaaaaaatatttacttgaagagttttccgtttgtaaaagagttcaaccttgttattccgttagttctgtaaccattgtaatcgattattgcttcaattaatcaattaaactatccaacaaaacatcttggttcacattcagatcaatgtaatcaattaatatgacaagtaatcaattattactaaactagtattttaaaactagtatccaagcaaacagggtcggccctggggtagggccaacagggcgttcgcccaggacccaaaattttttgtactgatagtttaagtaaaatttatttttttaaaaaaaataaaacttatgttaggggttcattttatgtgttaggggcccattttttctatctcttaattttaatattatttgtatttcaaaaaaattgtgtgtcagggacccatttttttcatcccttagttttaatattatttatatttcaaaaaatttatgtattaggggcctattttttgtatgttagatgtccattttttttcatcccttaattttaatattatttgtatttcaaaaaatttgtgtattaaaggcccattttttccatttcttagttttaatattatttgtattttaaaaaatttatgtattagggacccatttttttcacttcgtcctgggccaaagaattttcaggaacggcccgggaagcaaagcaaccaattatgttaaatggtaattgattattgacgaatctactgctttttacaaaaactggttacagaggtatgtaacataatagttttgctggtacaagaagtttctatgaaataagaaccgtgagaggtatttcattcatacagcagcaaaatgttatgtttctgatccatatattgactgacaaaatagcacagcagatttctactacctaacctaacaggttaatgagccacctgtccaacataaatacaaagcttaagacactccaaaaggtataggtggttgttctttagtctgaaaatacattaattactgcataaaatattaatagttttcaaccatcaaattaacaagattctttgatttaatgattcatgcattgaaaaaacttatttaatgctagcagataccatgtagaaattgggactaatatgccaagtagttagcactttgtttcttgagagaggaatgaactagcaaaattctaaaatgttagataccctgtcgacaaattttgtggcagaatgtccaaaaatacatcatgcatatatattgcggtccgcactatacaatttgacgaatttgtacatttaaatttcacgtgaaactttggccccttcgacgctggttgtttctggattcagggaaacatatatatataatcatgcattgtaacatcaaattatttacgttgttgcctgagttagaaatggaatgtatatggggtcaaggggatgatatatatatataaggattaacttaatatttttgtttgattctcattagaattttcagattagtgaataattatatttattaattaatattatatttattattatatttgttctaatttatgtttatttttttatttttataagtattataatattatatttacaatgattaaaaaagggagaaaaatgaatattaaattatattttggataaataatcactttcatttattaaaatttaaaatattgacaaattcttccctaaatataacatataatctcattcattaacgataacagatggaaattaatatattaataaatttataacattttttcactttcagaaattaaaattaaaattttcattttttataaacaaatttactctacacattcaaaaataaaaataattatttattctaataataataataaaagtatcaagtttgagacgaagggaagaaaagcacatactgcctttgtctcgtttccaaacacacttttccttactttattctgagtttcctttattgctaggcaactttttttatagtgataatgcacttttcttaaagtgaagaaagataatttattttaaattaatcattagcatctcaacatatcatttagattataaaatatgtcaactgtttttataatttattttttttctttttcattcttgtaaaaaaatgattttttataaaatatttttttcttaaaaacgttttaaataatatttttttattgttcaaaatatttattttattgttcgaattacaatctaaatcattttaaagatgaaaaataaaataaacnnnnnnnnnnnnnnnnnnnnnnnnnnnnnnnnnnnnnnnnnnnnnnnnnnnnnnnnnnnnnnnnnnnnnnnnnnnnnnnnnnnnnnnnnnnnnnnnnnnnnnnnnnnnnnnnnnnnnnnnnnnnnnnnnnnnnnnnnnnnnnnnnnnnnnnnnnnnnnnnnnnnnnnnnnnnnnnnnnnnnnnnnnnnnnnnnnnnnnnnnnnnnnnnnnnnnnnnnnnnnnnnnnnnnnnnnnnnnnnnnnnnnnnnnnnnnnnnnnnnnnnnnnnnnnnnnnnnnnnnnnnnnnnnnnnnnnnnnnnnnnnnnnnnnnnnnnnnnnnnnnnnnnnnnnnnnnnnnnnnnnnnnnnnnnnnnnnnnnnnnnnnnnnnnnnnnnnnnnnnnnnnnnnnnnnnnnnnnnnnnnnnnnnnnnnnnnnnnnnnnnnnnnnnnnnnnnnnnnnnnnnnnnnnnnnnnnnnnnnnnnnnnnnnnnnnnnnnnnnnnnnnnnnnnnnnnnnnnnnnnnnnnnnnnnnaaaaccattataaaaatgaaaaaataactaaattataaataccaaacaagtatttaagcctatgattttttttcataataaactgagagggacatacgtagaaaaccctgaacaagaataaagggctaaggcttgacaatgtaaggtcttggaagaatttttttttattcatctccaatttataaagaaagggataatttctacccttttgcttgtttctttttcttttcatataattcttgatctttctaactaagggttgatagactcgcacaactagattgtaatgtaattgaattttactcctaattcatgttaaaatttgtcatttagttattaaatatccactatcttctcttcagcaatacaattttaaatattcactgcaaatatatagtgttcctagtaaatttaagaataaatatagttattttaaatagaagtatatatgaaaaaataattaataagacttttaaagcatcaacaatgttaaaataaaaaaggtaaaataacaatagttatgaaatggagaaaaataatttattgttcataaagctatatgtacataacacccacaaaacttttaaaaattgatgttcttataagcatatgctactttaagaatatttaccaagaacttgttccaataagcatttcttaggatgtgcttaatagaagaagaaaagaatatataagtgaagtgtttgataaaataagtgagaaatacgataaaaataaaagtatttgattttagagaaataaaaaaaataactattcatttattttatttatcttttttttttgttactaatcaatattatgttgattttttcctttttatttctttgaacaagttacttttttttttcttctaactatttctttctgttccttttttaagtttcaccacatcagccacctcggatccgatagacttggaggtgctttaatagatggctgttgccctgtttcgctttttacggagcctaatctttttccaccaaaaaaagaaaaagtcttattcccccacgtacatgaacaaagtggctaaaacatgcagcattttggcaaaaaattaaaaataatacaattaaataaaaaaatttgagaaatggtgcaagctagaaaatatttggtaaaatggtacaaccattcacgtccaaaataggtgtgttataacacgcccaaatggggcgttttcttgcagatggcgccatgtggcagtgtccgagtgtagcgtggttttttttcgtaaattttggaaggtcataactattgactggggcatccgattgaggcgaaaccggtggccacgcgatcgttgtttcgaggagaagcccttggcaagttcctaaaggagacttgcataaaatttttccccaaaagaggcctctaagtgcctcaaaattgcgatttaattgtcgaagctacaaaaaatttcgtgtttgctaattttttatttattcaattagtgaattgcaatctattctttgtttatctaattacttctcttaatttcgagcgttctgacataaaatacgtcatcatcggacattgctacgagaaattacgacagttcaaagttatatgcatcgtcaattttacagtataattttggattatttatttatagtgtagaattgacaatgcatataactttgaacagtcgtaatttctcgtagcaatgtccgatgatgacgtattttatgtcagaacgctcgaaattaagagaagtaattagataaacaaagaatagattgcaattcactaattgaataaataaaaaattagcaaacacgaaattttttgtagcttcaacgattaaatcgcaattttgaggcacttagaggcctcttttgtgaaaaaaattttgggcaagtcccatttaggaacttgccaagggcttctcctcgaaacaacgatcgcgtggccaccagtttcgcctcaatcggatgccccagtcaatagttatgaccttccaaaatttacgaaaaaatcgggctacacctggacactgccacatggcgccatctgcaagaaaacgccccatttggacgtgttgtaacacgcctattttgggcgtgaatggttgcaccattttgccaaatattttctaacttgtaccatttctcaaatttttttatttaattgtattatttttaattttttgcccagcattttcattatccgagtgaatatggaagagaaacttagagcatatttaattattttttatttataagaatttgttaaataaattatttctataaaatacttaaatttaaatttaaaaaatctacaatattaattggattttctctaactacaaaaaataagaaattattttttatcttaaaaaattcatcaaacatcttatattgaaaatcaacttagcaaaattcctcttttttgaacggtgatgtggccatagtcaattagtcattgacttatgattatctttggaataactttatcttttctctccttaaaaacagagacaatacataaattggctgtgaatgtgattggagggttttgttacgtaatgggggtattttatttttttaattaccgtttgagggtagttttcaaattaattattaaaaaggggtaagtcgtaacatctgttacgacttctcagtcggaattttatttttttttaattttttaatttgaagtcgtaaaaatttttacgacttcaatgtaatttttttttatcctaagagtaaaattttttacacagaagtcgaaaatatatttacgacttagaagtcggaaaaatatttacgacttagaagtcgtaaatatatttannnnnnnnnnnnnnnnnnnnnnnnnnnnnnnnnnnnnnnnnnnnnnnnnnnnnnnnnnnnnnnnnnnnnnnnnnnnnnnnnnnnnnnnnnnnnnnnnnnnnnnnnnnnnnnnnnnnnnnnnnnnnnnnnnnnnnnnnnnnnnnnnnnnnnnnnnnnnnnnnnnnnnnnnnnnnnnnnnnnnnnnnnnnnnnnnnnnnnnnnnnnnnnnnnnnnnnnnnnnnnnnnnnnnnnnnnnnnnnnnnnnnnnnnnnnnnnnnnnnnnnnnnnnnnnnnnnnnnnnnnnnnnnnnnnnnnnnnnnnnnnnnnnnnnnnnnnnnnnnnnnnnnnnnnnnnnnnnnnnnnnnnnnnnnnnnnnnnnnnnnnnnnnnnnnnnnnnnnnnnnnnnnnnnnnnnnnnnnnnnnnnnnnnnnnnnnnnnnnnnnnnnnnnnnnnnnnnnnnnnnnnnnnnnnnnnnnnnnnnnnnnnnnnnnnnnnnnnnnnnnnnnnnnnnnnnnnnnnnnnnnnnnnnnnnnnnnnnnnnnnnnnnnnnnnnnnnnnnnnnnnnnnnnnnnnnnnnnnnnnnnnnnnnnnnnnnnnnnnnnnnnnnnnnnnnnnnnnnnnnnnnnnnnnnnnnnnnnnnnnnnnnnnnnnnnnnnnnnnnnnnnnnnnnnnnnnnnnnnnnnnnnnnnnnnnnnnnnnnnnnnnnnnnnnnnnnnnnnnnnnnnnnnnnnnnnnnnnnnnnnnnnnnnnnnnnnnnnnnnnnnnnnnnnnnnnnnnnnnnnnnnnnnnnnnnnnnnnnnnnnnnnnnnnnnnnnnnnnnnnnnnnnnnnnnnnnnnnnnnnnnnnnnnnnnnnnnnnnnnnnnnnnnnnnnnnnnnnnnnnnnnnnnnnnnnnnnnnnnnnnnnnnnnnnnnnnnnnnnnnnnnnnnnnnnnnnnnnnnnnnnnnnnnnnnnnnnnnnnnnnnnnnnnnnnnnnnnnnnnnnnnnnnnnnnnnnnnnnnnnnnnnnnnnnnnnnnnnnnnnnnnnnnnnnnnnnnnnnnnnnnnnnnnnnnnnnnnnnnnnnnnnnnnnnnnnnnnnnnnnnnnnnnnnnnnnnnnnnnnnnnnnnnnnnnnnnnnnnnnnnnnnnnnnnnnnnnnnnnnnnnnnnnnnnnnnnnnnnnnnnnnnnnnnnnnnnnnnnnnnnnnnnnnnnnnnnnnnnnnnnnnnnnnnnnnnnnnnnnnnnnnnnnnnnnnnnnnnnnnnnnnnnnnnnnnnnnnnnnnnnnnnnnnnnnnnnnnnnnnnnnnnnnnnnnnnnnnnnnnnnnnnnnnnnnnnnnnnnnnnnnnnnnnnnnnnnnnnnnnnnnnnnnnnnnnnnnnnnnnnnnnnnnnnnnnnnnnnnnnnnnnnnnnnnnnnnnnnnnnnnnnnnnnnnnnnnnnnnnnnnnnnnnnnnnnnnnnnnnnnnnnnnnnnnnnnnnnnnnnnnnnnnnnnnnnnnnnnnnnnnnnnnnnnnnnnnnnnnnnnnnnnnnnnnnnnnnnnnnnnnnnnnnnnnnnnnnnnnnnnnnnnnnnnnnnnnnnnnnnnnnnnnnnnnnnnnnnnnnnnnnnnnnnnnnnnnnnnnnnnnnnnnnnnnnnnnnnnnnnnnnnnnnnnnnnnnnnnnnnnnnnnnnnnnnnnnnnnnnnnnnnnnnnnnnnnnnnnnnnnnnnnnnnnnnnnnnnnnnnnnnnnnnnnnnnnnnnnnnnnnnnnnnnnnnnnnnnnnnnnnnnnnnnnnnnnnnnnnnnnnnnnnnnnnnnnnnnnnnnnnnnnnnnnnnnnnnnnnnnnnnnnnnnnnnnnnnnnnnnnnnnnnnnnnnnnnnnnnnnnnnnnnnnnnnnnnnnnnnnnnnnnnnnnnnnnnnnnnnnnnnnnnnnnnnnnnnnnnnnnnnnnnnnnnnnnnnnnnnnnnnnnnnnnnnnnnnnnnnnnnnnnnnnnnnnnnnnnnnnnnnnnnnnnnnnnnnnnnnnnnnnnnnnnnnnnnnnnnnnnnnnnnnnnnnnnnnnnnnnnnnnnnnnnnnnnnnnnnnnnnnnnnnnnnnnnnnnnnnnnnnnnnnnnnnnnnnnnnnnnnnnnnnnnnnnnnnnnnnnnnnnnnnnnnnnnnnnnnnnnnnnnnnnnnnnnnnnnnnnnnnnnnnnnnnnnnnnnnnnnnnnnnnnnnnnnnnnnnnnnnnnnnnnnnnnnnnnnnnnnnnnnnnnnnnnnnnnnnnnnnnnnnnnnnnnnnnnnnnnnnnnnnnnnnnnnnnnnnnnnnnnnnnnnnnnnnnnnnnnnnnnnnnnnnnnnnnnnnnnnnnnnnnnnnnnnnnnnnnnnnnnnnnnnnnnnnnnnnnnnnnctattatgtaacttacccattgctgagaaagttatttacttccccatgttagatactcctcctctttctattgttacaaactaatgccaatgcattgtttggcttatgcagaaagacagtatttatatttggtagaaagataatatttacgtagaaattgaaaataacgtaaaaaaatgataggaagagctgtaagcaggatcttttatcaaaattgtcggtggtgctgttgcaatttgcaataagtaataaataataacagaggtaggcattgaagatgtcactgctggtgtctatgtaaagaaaataggtgaaagttacgtaagatacagagctagacttaccctatgtttggaagaggaaaaaataaaagagaggaaagaaaacttcaaaatttaaattggagaaaaaattaaaaatagaaaagttgtaatttttttttctaaaagtgagttactatctttgatttttttttttctcaaaccaaataagagaaatatatagttatacatgtttttctttcttttaattttcttttcttttatttgtgttccttccaagcgggcccttatagagtgaaagacttttttttctgagtgacatatggtgattggtcagtggtggaagatggcgtaggcaaatttcgaaagccaataatagtaaagctttatgcgcaaagacctacataaaattttataatatatatacattctttgggtcttacttttttatttttattgcatcacattatttactatatttttcaactttatttgataggatgatatatttatcaataagtaagtatatatacctttcgtaaataattcgtttttaatattaaaataatgcttctagagaatggtgaaagcagagttatattagggagcaatgataactgcatactcttttttttagatgcgtgtatggataaaaataataatcactatccacaccatttttaatcaaagttaattaaaagtaaataataaataaattcaataataaataaaaaaattaacaaattaaaagatgaaagaaaagaaaaataatagaaaaaataattataaaaaaatcatttataatataaagataacaatgaagagaatgatagatatactaaataatatataataactaatgaacaatgaagagaaaaagaaaagaatagaataaaattaagatggaatatatataagcagtggcacaggcatggattacatccacaccgaaacaacaactgaagatatattatggcattctccatcttcaaacatgttctgtcattattccttctctgcattttcttgcaggaacctaccaatgcccttagaaaggctagtaagcttttgccttttagttcccccgttacggttttcaataaagaatctgatggagttttgccatcatctcttcaagttccaactttgagaatttccaaatttatattttgttaattaatgtaccatgaaacatttcaccaattgtgtgctttgaattctgtgttttcagacctacattgtgtacatgggaggacattctcatggtccagaccctttgccaagtgatcttgaaacagcctcaaactcccatcatgatttactcgcttcttacttaggaaggtaacacagatgttaaattctcttaaatattatcaggacgtgcgtgttaattaaaatttgataatttaacagtcatgagaaggccaaggaagcaattatgtactcgtacaataagcacatcaatggctttgctgccctacttgaagaggaagaagcatcacagattgcaagtgagcaaacttcactaccatatattgccatgatttgcttgtcatcttgacgccacacgaattgatataataatgtattatatgtttctattggtacagaaaatccaaaagtagtttctattttcttgagcaaagagcacaaattgttcactaccaggtcatgggattttcttggactggaaaaaaatggaaaaattcctgcaaactccgcttggaggaaagcaagatttggagaaaatataatcatcgctaacattgatacaggtatgcttaattaatctctttttgactacagttcatcgtgctcttaattcagtttacattattttcttcttcatgaatttgtactgcaaacatattttccttttgtaaatacgttagttgcttcttgaacaggggtttggcccgaacacccgagtttccgcgacaaaggatacgggcctgtcccttcaaagtggcgagggaaaggtgtctgtgagatcgacagttttaatggtacaaagagttatctatgcaacaggtaatctttctgttatttcaattcaaaaattgggttgagcgtgaaataatatatgtattttaaaacgttgtgattatcacaccaatggaaggtagttattattttatttacagcttaattaatgttttatctgtatagttttggttcttatttcttcagttcatttattttaaataaattcacaattttaatttaatacttaattttgcacatttttttttgttttaattaattaaattatcttttagtaattaagtgttcaattttcaatcctaaatgttagttaaaatgtaaaaaaagtatgcaaaatcaggattaaattaaaattgtgaatttggtaaaataagaaaactaatatcatgaaaaaatagagagatgatctataggcgattaaaattataatttagctattctattatatgatgtattttgtgcttatgaaggatgggtttgaaacgaaagaaaaactaccaaagtatactagatggatagaaatataggcgtaattaactattattctatatatgtattttttttttaattttagattataaaggaataaaaatataatcatgatgaatattcaggaagttgataggagcaagaatatttctaaaaaatcgggaggccgaagttgcgaagattgacccaaggctacgcagtggacgtgacttcgtagggcacggtacccacacactgtcaactgctggtggtaattttgttcgcggtgcaaatgttgaaggtaacggcaatggtactgctaagggaggctccccaagagcacgcgttgttgcctataaagcgtgctggcaaaaattggatgtaggagggtgccatgaagcagacatgctacaagcatttgatcatgccatttatgatggcgttgacgtcatctctgcctccgtgggttattctaatccctatgccgaagctttgttaacagatgcgatttccgtagggtcactccatgcagtcgccaaaaacatagtggttgtttgctctgctggaaatgatggaccatcgcctttaagtgtcgcaaatgtggcaccctggtccttcaccgttgctgctagcacaatcgacagggattttatcagcaaaatttctctcagcaacaatcaatccattacggtaagagatctaatctagagattgatttatttcatatttttattatgtcaacttaattggaacctacttgtatcagggtgccagtcttaatcgtggtttgtcaccatcatcgccgtcacaaaagttctattcggtgattaattctgttgacgctaaacttcctactgtgtctacggatgatgcgtaagcacagttttatttattatttcccaagcttgctcaaatatttatatatgtatacttgtcttatatgttcgtgtgtatatatgtatgtatcttggtgtagccgtctttgcaaaccgggaacacttgatcctagaaaagtaaggggaaagatactaatctgccttcgaggcaataaattaacttcagctaaagaggttcaacagggtcatcttgctggcgctgtgtcagtttttgtgcaaaatgatgaggggagtggaaatttacttctggccgaggatcatattttaccagctgcaagtgtcggtggaaaaaccaatcatattttaaaaggacatactaacggcggcaataacaagtaaagttgatatactaatccctttaaaacgtcgtattctagatctctctctctctctctctatatatatatatacaccacacacacacatatacttgcagcaaagcaagtgaagcacttgaatattaatttttatatgtgttgttgcagggagattttagcttacttgaatgctgcagaaacacatataggagtaaagccagctccaatcatagctggattctcatccaggggtcccagttccgtgcaaccattgatactaaaggtccataataatatatacattttgttaactacacaccacatgaccagatgattaacttttcattcttacaattaatgacttatgtagagataaatttaagataattggtttcttttttcagcctgacataacagctcctggtgtgagcataattgctgctttttcacaagccgcgggtccgactaatcttgcaacagatagacgtcgagttcttttcaccgtgcaacagggtacttctatgtcttgtcctcatgttgctggcattgcgggtcttctcaaaacatatcatcctaattggagtccagcagcaatcaaatctgctattatgactacaggtacgttcattaccaaagtaatatccatataaaatcttcatgcacaccaaatcattggcgacttattaacaacgtactatgctttttattaattccagctacaacactagataacaccaatcaaccgattcggaatgcatttgataagaaagcaactcccttcgaatacggcgccggacacattcagcctaaccttgcaattcaccctggacttgtttatgatttaagcacaaccgattacttaaacttcctatgtgcttctggttacaaccaagctttactcaagttttttgccaatttgaaattcccttacagttgtcccaagtcttacagaattgaagatttcaactatccttcaattacggtgcatcatcctggctcaaagactatcaatgttactcgtacagttacaaatgttgggcctccaagcacgtatgttgtgaatactcactggccgaaggggattaaggttcttgtgcaaccaagttcgttgacttttaagaaaactggagaaaaaaagaagtttcaggttattcttcaggccattggtgtgcctggtcacaacattcctttatttgggaatttgtcttggacagatggcaagcacagagtaactagtccaatcgtagtgctggacacttagaaattactttcaccattgttatgttatcattgtcattttagtttgtttgcttttgttgttttttaggctgtagtataagcgtgttttctgctcatgttgcattgaagtactttgtcacaaaaaataaaaggcacaatcaacaaattaggacttcgggatgcgttgattaaaggttaagattgttgtgcctgcatgtaatttggcatatatatttaagattgttgtttccttttccttttgtgaaaaccagattaaactttcattatttaactaccttttctaatcgatcttagcaacttgttcttttccttggtttctcataaatcaaacacggagtcatggtgatatttacttgactttggagattcacttgatccaaaatccaagtcattggtggctataattttgtaaatttaattaataggtcaagttgtaattttagtttcttagtttttttttaattgtaacatttgattcttaattttttaaattgataattttggtatcctgctagattattaataattaattatgattgatagagtttttaaattaattaaaaaatcattaactattaaaaactttaataaaagaattattaattctaatcctttactgcactccactcctcctctcatatgtaaacaactctttcattgccatcgcttcacaccacactactagaaaaatgtgttttaacatcgctaagttaacatcgattttattaaaaatcgatgttagccaaaacgcggtggcaaattcgtaaataagcggacttcgttaacatcggttttcttaaaaatcttcaaaaccgatgttaacagaacaccttaacatcgatttttaaggttattttgaaaaatcgatgttaacagatagacggtaacatcggtttttaaggttattttggaaaccgatgttaacagatagacaataacatcgatttttaaggttattttgaaaaatcgatgttaacaaatatacagtaacatcggtttttaaggttattttggaaaattgatgttaacagatgacgttaacatcggttttctttgaaaaccgatgttgttaaggagatagtcaacattggtttttctttgaaaaccgacgtggttattgtcactataaaagtgctggcccccaaaattaaaacccttcactctggtgccttcactactgtcgcgttttgtcagcattcactgatcttgttccccactgctcgtgttcttcactcccattgtcacttagacggtggtcttggcgcttccaatctcgctcttggtctgcttgcaactcacattttactttcactctcactcgcgctcaggtactctcgcaactcacattttgaattcactggttactattcactgtttatgttaccaccatggatttccaaagtaggaggcttcatttgctcgagaccgtgtggttgccatcgttggtgttagcttcacaggtacttgactttatttcatgcttattggtgttgcttattcatgtctatgagacaatggctatctactgatgtatttttgataaaaaaaatgtcggatagttgtatggtcatttgctagaattggttttattgggtgataattgtatgtggtagggtactatgtggttttaagatgaaatgttgaataggtcagatgtacatctgtagcatgactggatctgtatgcctttgttggaatgatgagaactaataatggtcagccaagcaaatgagcataggacctggatattttcaataggagaaacaagaaagaaaaaacaaaaacagaatacatgttggctggcttgttttggtttctgttttgacttgtgggatacaaaaatagtggggatagttatagccttatagatgtttaatttattgatgttgttattatactaaattaagtttctatgggttgattttttgggaaaacttagcaactgatagtgcaagttccatttttcctatatatacagtccccaattatcaagatgagattatttatctcatagtttagtgccaccaagctgagtagtgagaacaaaatactacttaatttaagttaagtaatagtcacatgttgtatattatagaatgctttgatgaacactaaggattaaggaatactaattattggctgggaaaaaatgacttctgataaacatgtgaaagttgactcttatgcctcaaactattgtctaaagtagtgattaaagaaactcttagattacatcctgtagcgtttgcatcacatttgggtgcctcaatagttctgtcatagcccactctagggctccaagggtagtatcacttcctgcaacaaacatatcctgaattgaaagaaacaaaaatcaattggtaatatatgtcattatcaccatagttttgtaacttcaattaatgaaaaatgaaaatgaaagtaagaatagccgttacacttaatctcaagcacttttattagtatggaccttcaccttgagatttatcacactacttgcctgttatttttcatttctccttggttcaaaaagtttttcaatttgtcaaatttcacctgcaaatttcattgatagttgaggtatgatgagggaaaactagtggatgagatgatttctgaatacaagaatgggagcctattgagaaggaaattaagaatagttttagctaagtattttgttttgtgtagcagtttcatttgaacatctgaagacattgctgctgggaatagtagttcaagcttgtggtcatgtgcaggctacttacttaaaactagttattacttcccttcatcagtgtccccaaagaaaggtggctggtccttgtcaagacaccaatgaatttgtaaagtgtaaactagatgtatattaacaatacatcgtttccaaagaattactcattttttaatttctccttaattgtctgatgctttcatttatgcaagcaccaaatgctagagattatgactgagtttacatcacttgaatattttaaattgatttctgtgtttgataaggccttggcatatattatgtaggtcattgataaagtggtacctgcattagttgaccttgcaggaataacaactaagtgagcctgcaaccccagttacaccgccaccatcagtagaacacaagccacagccagcctctactccttcaccaaaggtaagccttgtgttaaagttaaatgtaaaccaaataaatatggtctcactattaaatatagtctaatgttctatgttcattgtaggttgtaggagagcaacaccgttttcccatttgccttgtcttcacgaccttcattgttggacatttcacacagatcatcatcacaggtacgaatatgtttcatatttttgttgtacaatttggcttatgactggttttgaaatattttgtatgtcaagtatgcatcttgccttttctatacaattaatgttcattatgagtgaaccttagtttctcgtttgagattcattacaatgattcttccggacagtttggattaatcattgtattgattcttgaattgtccatttggacagtttgggaagacttattttttatagtatattcatatgtatatgttgagtttgttttcttaaatttgatgaaattttggtacaatgtatttcactttgttctccgggtgcatacttgattgtggtggaactcatgtcaccgctttcatgtcgtgtacttggagactaaagcgaaatgttgccaaaatttcgtcaaatttaagataagagactcaacctatacatatgactatactatgaaaataagtctttctgaatgggatagggccacaccttcaatgaaaaaagtgaggttttcatgcatggaataactttgtgagcatcacagagttattaattagatggatcgaagttggatgaatgcaagtcgcatcacggttgagtatgaggaaggcgttgaacatttcttgcaatttgccttggaaagaagtcgaccggatggggatgaaaaatatttatgtccttgtatcaattgtttgaatggaagactccaaacactggacgacatacgatagcatcttatctgcgatgggattaagaagacttataccacatgtatatggcatggtgaattgacagacacgcagagggtctcgcaaactgaaccggttgatgttgacatcggagatcgattggaggatatgattcgtgatctgggacatgattcttttcaacaagcacatgaccctatgtatgatacattggaaagtgattcgaagaagccgttgtatccggggtgcaaagagtctttgacactgttgccagcggtgttaaatctggttaatgtcaaggccagatatgggaggagtgacaaaagcttcagttgactgcttgaggtagttcaggacatgctttcagatgaaaacacgttgccaagaagttattatcaggccaagaagattctttgtccgatgggtatgaagtatcagaaaatttatacctgtcctaatgattgcatattgtacagaaatgaatttcaagaaatgcataaatgccctaggtgtggggtatcacgatataaactgaaggccgatgacgactgtagcattgatgaaaactcaaagaaaggccccccgcgaaggtgttgtggtatcttctgatcattccaaggtttaagcgtctgtttgctaatgaagatgacgcaaaagaccttacatggcatgcagatgggagaaactgtgatggaatgctctgccatccgccagattcctcgcagtggaaaaaggttgaccatttgtatccgaaattcggggaagaacctagaaatcttaggcttgcacttgtcagtgatggaatgaatccttacagcagtctaagtactcagcatagttcttggcctagtttgctagtcatttacaacctgtctccttggttgtgcatgaagcgaaaatatatgatgttgtctatgatgatatcgggaccaagatagctaggaaatgacattgatgtttatcttagtcccttgattgaagacttgacagacttgtgggatgagggggttgccgtgtttgatgggtatcataaggagacattcaagttgcatgcaatgctattttgtaccattaatgattttcctggggactgaaatttgagtggatacagtgttaaggaccatcgtgcatgccctatctatgagcaagacacgagttacttgtaacttaaacatggaagaaaaacagtttacactcgccatcgacgttttcttaaaccttatcacccttatcgccgattgaaaaaagcgttcaatggaagtcaagagcatgaaactgcaccgattccattaaccggtgaacaagtggttaagcggtttaaggacatccatactgtatttggaaggacccaaaagaagagcaaaggtaatacttgcatgtggaagaagaggtcgatattgtttgatcttccatactggtctgatctagatgttagacattgtatcgatgttatgcatgtggagaaaaatgtgtgacagtgtcatcggcacgttgcttaacattcaaggcaagacaaaggatggtttgaacactcgtcaagatcttgctgagatgggtatacgtgagaagttacatcctaggtctgatggtaagaaaatttacttgcctccagcatgtcacactttgtcaagaaatgaaaagataagtttctgtcatagtttgcatcgagtccaagtgccacaaggatactcttcaaatattaagagccttgtacaaatgaaaaatctgaaactagttggcttaaagtctcatgattgccacgtgttgatgcaacaactattagccgtggcaattcgagacattttgcctaacaaagtcaggcatgctataactcgcatgtgtttcttcttcaattccatttgtgtgaaagtcgtggaacctgtaaagttagaagacttggaagaagaggcggctattatcttgtgtcagttggagatgtattttcctcctttatttttcgacataatggttcacttgttcatctggtgagggaaattaaatcgtgtggtccagtttatttacggtggatgtacccgatcgagcgatacatgaagatcttgaaagggtatacaaaaaacctacactgtcctgaagcatccatagttgaaaggtacattgccgaagaagctgtcgaattttgttcagagtaccttgaaaaagcaaaacctattggtcttcccgagttgcgacataacgacagagtgggaggaaagggtacacgagggctgcatgttataacgccttctttgcaggaattgtaacaagctcatttgtatgtcctcaataacagtaatgaaggtcctgccatacatggttcgtcatcaagcactactgaaggaaagtaatccaagaatgacaaagaacaggctgttgaaagagcataacaagactttcctggaatggtttaaagatacaatattgagtgatgattatgcatctcaaactatgaggaaattagcagatgggccaaaaggaaatgtaagaagttggcaagggtatgatatcaataagtactcgttctacaccaaacaacaagatgacaagagcacaatacaaaacagtggggttagcttaagggctgagtcgcagcacttcgcaactgtgcacgaccacaatccatgtttggcttccatgccttactttggagtaattcatgacatctgggagcttaattatgtaactttcattatgtgtgttttcaagtgcaagtgggttgatatcaatatcagtgtgagaaccgatgactttggatttactttagtagatcttaacaagctcgtttatcaagatgaacctttcatcatggcagaacaagctaaacaagtattttatgttcaagatccatgtgatgaaaggtggtcagtggaactccatggaaaaaccattggtattaatctagacgatgatgattcaacccttgatgctggtgtcattcaattctcgacaccaatggttgacgtcaacagaaaagatgttcttggcgatgttcatgcaaatcgtaatgatcatgatgaaggataattaattaacatcacttaatgtaattttcttgataacttttttcgacatttcattttaataggtaaccttacttgtcagttaactttacttacgtttttttttttttgtttttaacatgatcatgactacaccaccgacctcctctcctcctcttgaatcagcacatcctttgcctgagtcagcacctcctcgtcctgaggcaccacctcctcctcctcagtcaccagcacctcctacggggaagaagactaggaaagcaacacggttgcgttcactggctaccagacctcctggtgctgacagaccagtggttcatgttgaccctaggactgggatgtctgatggtccccaggcgaagaaattgaagacacacctagggatcgttgctagaggcaaggcagatgtcaccattgccacctggaaggaagtttctgatgcgcagaaggagttgatgtgggaggacattcaggtattacaattaaatctccaatgtgattgcctataatgatacaatataaatgttattctaacagttaaacacacttcattataactcagattgaatttgatatacctgaagcgttcgaccaacagattaagaagaaaattctgcagatagtaggtgagcgatggaggcagttcaagttagacctgaccaggaaatgggtcttgggaaaggtctctaaagacgatgctgatgttgtctgcgagaaatatggcatcagttaggaaaaatgggcccaattctgtgagacacgtagagccgcttcctaggaggttagccgagttacaatgttttacaatttcacaactatgaagtcaaacaaacgcttttttttaccctatatgtgtaattcatacaggatgttagaaagaaggcccaggacatccagaaactaaccaccggccctcacgtgttgtctcgcgggggtacgacttgttagaaaagaggttgatggaaaaaaaaacaaaagaaacaattggaggaagctacccatcctgatagcacagagaccatcatccacccttcttcccccgtgagacggcacgtcaagtggaagctggctcgcacgaaaaggaccggggaaatgacttctcaggcggcacatgatattgctgagaggattgtaagtcaaacaacaatctcaatgacattctatatgaatttttgcatcacaaatgacaaaactaatgtacttactttcattgcaggattccctggatgagcaatcctcatagggtacttttgttgttagtggacgtcaggatgtcctgactgctgccattggacgaccagagcacccgggccgtgttcgcggtgctggagccggtgttaccatcacctattacttcggaccggctgcctcaacctctcgtaagtcaaagtcaatggcgcctaaagacttggatcgcctaaaagacaacatcagggtagagctggagcagtccatcgctaatcgacttacacagtccatcactgatcgacttacacagtccatcactagaaagttacgcaacaagtggtgatgagcttcagccaattgcagacccagatgcagtctcagggtgccatgccgcctccagaggttcagtcatgccctattggtgtccatgtcagcaccaagggaagctgtgtcgatccctcggggaatgacccagacacgggggcatctgacatgtatgagttgtatgtcgatgacaatcctcccagcctggttgcccttggcagagtttatgagggatcgacgatcgtgcacaacgtccctcttgccactgatcaggtaaaggtgagtgttgaggaagtatgcgatgcagatgctcgcgtccctgtacctactgacgaggttcagttagtggggcaaacccttaacactttccttgcttggccgacacatcttgttcagactatttcatcacagatatttcatttttgccttatttcttctcatttacaaatttgtctcatacaaagttaacctgatcgttcacttatggttcttaactgtgtagggaaaacaagaagccaagggaccggcgaaacctgtagataatctggaacatttttctgatcccttgtaccaaatcgcgttgaccatccccgatcttttcatcagacccttgcaggtgtcatgggacgcggacatgttcggtgtgcagaataacgacttccccttgtacatcaagcatgaggatatttcggagattatccatggtggtcaatgtctcaacatctccgttatacaattgtggcttctgtaagtgactttcaattgcctaccattattacttgttgaattgtctttatattcttgcataattgattttatttacacgctaaaataggcatatgaatgaattgagcatgcaatcagatcatgtcgatgtgtacggattcctcgagccacaatctatacagagatctggtcaatctcaatttcaaatcgaggactatatcaagaaatggatgcagagttcacataaagatgtctacgttgcactgtatttgaatgggcaagtataaatgagtatcgcaatttaattaatgtatgcagtatatataataacttgtttttcaaaatgcaatgcacattggcaactggccattatatgtcctaaggccaatgtagtcatctgattctgttcgctgcataacaggcctgataactaccttaaaggaattattaacaggtaggttgtaatttgtaacaatttatgttatttctatggcatgaatatgttaattgtatactatgcatgcatgtttctcttaagcagttctttgaagggagtccaagaccctccagcaaataaatcaaaggctactactaaatggattgcacttaaagtaagtcttctaataaatcatggtttatgtattgaaaataatttttattactatttaccctaattgccatttaactttgactatgttattcaatttagtgtaataagcaaaaaggaaacactgagtgtgactattatgtcatgcattggatgtggataatagtccaaggaggcttcacagataactaggagatgataattaattgtcttctacttaactaatatgttttgtgacttgtttttgttttgtgcttattcaattatttttctcatgtcatgcagtatttcactgatgaaagaccattggaagccgacaccttgaaggctattagggttcaatgggcaaagttttatcttaaagttagagatgacatattattatagattaggtggttcttggattttcaaaacaattgtataaacattaggttaggcaattttcttatgtacatatggacactattgaattttatttgttatttaattgaaataattaatatatttaaatgtattctggaattggctggatgtctgatttttaattcacaggttaaagaattgctaaaatttaaaaaataaacaaaatattaaaaaataaaattaatagaacaacatcgatttgaccaaaaccgatgttaacttatactacaacatcagttttttttacaaaaccgatgttgtcatgttacttaacattggtttcttcaggaaaccgatgttaatgttctaacattaacatattttacgtttttatttccagatagcgacattggttttaattgagaaaccgatgttgtgacgttaggttaacatcggttttggaaaccgatgttaacttccacactttcaacgtcgcctgattcaacatcgggtcaaaatcgatgtcgaatgtaaaaaataaccgatgttgaaagctgtttttctagtagtgccacttcactggtagtagcaacacattaggataattaatattttattaagtttttttaatgattaatagtttttatttaacttataattaacttaatagttggtggtaattttgtcatgatgcagacatccttgtagcatgtctgcatgtaatttgatttcactttaataattttagtctctaattttttaattcatgttggttttcctttttttaattataatatttgatttcctaattttataaattgataattttaataaccttaataatttattaattatgattaatagagttattatgttaagtataaattaattaaaattcattaactattaaaactttaataaaataatattttattaagttttttaatgattaatagtttatttaactcataattaatttaataattctattaattcggtgttagtactctgtcggagcttcttattgatgcaaacgatagtgacccatcaatggttatcaaggccgattgtgacgaatatgatggtgttcaaacgaatgctgattacaatggattatattaatgaaaaatacatgaaactggattgtgatcaaactgtgaacctattgttaacaccgaatctccatggacgtgagggtgcaccgcctatgtcaaacatatgggtcgagccaatctattgggagaagcaaacacatggctcgaaccatgataacaacattgttgcgattggtcaatgcacactgagcatgtgtcgtctgatcaagagactccatggcagtgcttgttggcttcgtgatagtggtccttgatagacccactccacgaaccagattttgataacttccctgctatgtgagcttagagaggtccctttacttgaggccgaagggttgctacgtcagccaggctcaccatacaatcttcattcgaggtcgaggagttcctgacacggtgtgcaaattaatgtctgaagttttaaccgagcaggagttagatggtgccgacgactttacaaacgcatgcgtgttgaggtgttgaagtgtattgctatgccgagatgattgagcgagcctcgtacgagatgtctgagtaagacttgtgacgaggtgtccgaatgaatattgtgctgacgtattcaattcgagccacgagggtgtgttggagcattcttttttggattattcatgtcggcatgtaggtgctattttggtttgaatgccagagtaaatagtggggaagacttcgacagtgttcagatatgcaaagccggatagtgcactttcgtatcattctttttggggtgtccttccttattgctcaaagaaactatcctccgaagggtggcgtacctacaaaaaaaacatttcgaccctcaagtctcgacacagagagaatagtgagaatagtaaatgaatggatagaataatgtgttacctttgagaacctaatcctttatatacacgtatttattagccatacctcttaattgaaggggcgtaatatggaattacctgatagtgttaatatatagtattaagacaatataagctaaattccttaacctcactgatagtgttaatatatagtattaaaacaatataagctaaattccttaacctcaatgatgtggttgctgagagggtactaggctatgctgaagggatttcaggttctggccgagagggtactatgtcatgccaaaggggtgcttaggtcatgccgaaagggtactaggccatgccaaaggagtcttaggttacgtcgaaggcgttctaggttgtggtcgagagggtactaggttgtataaaagctataaaagcttttttggtgaggaatgaattatggattgttgcagcgttgcaggtttgagaatgctgttgtggcagcagaaaagattggcctgttggattatagtaatgtcgaagttggtaggattgttattgttgtgaaaatagtgacataacttttcaattgcatgggcctaatccatcccactttgatgtcaaaataaaccttttagacaattgaggttaaaaaaagatatagagaaaatgaggcagtggatataaaaaggggaaggttgaacaacacattttagacaattgagttttgaaccttcaaagatgcaagtaagattttgtggccttagggatgttagagatttgaacaatccaaaaacctgttctactcattttggtaggaccgtaggaggaagggtcatgatttactgactataatatgtgcattttgcaggcaagagggtgtgggtccagtttgggaacagcttcatatcataaagaagttgttacaaattccttttctcagttagtgcttcaacttcatgattttgatgatccagagaaggttggaaaataacttccagatatatattccttatttatttatttattatgtgctttatgttgtgctaagcttttctaaactgtcaaatatttgcacaaataaagatcagagtgaagattcattctggttctttttctttatgtggagctctggctgctcaggccaagagagtccagtcaagctgggttatgctggacaagtaatggatataataataaatacttatttgaggatttgattcgtatcagaaattggttgagaccttcctcttagaagattgttgatactaaaaaacaataatcaatgtggttaaattgaaaaatgcctgattatataaatggaccattaaaatatctcttattttttagcttttacattttgcatttcataattttatgttaatcttaattgttacgaactcggcaagtataccgatcgttacaagtaataaagtgtaagtagagtatcgtctccacaagaattgaggcactaatttaatcacaacttgttatcttaaaattgaaatgacaaataatatgtttttaaagagaatatgattgtattttggaattgaaaaaatttaataactgaattaaaaattaataaaaatttaaaagcaatattaattaagagttacgcattgatgaggaagaattgtggtatgagcacattcacctttgatcctaccttttgtatttgaattggttactaatttcaattattctaattcctcagaggatgtatttttacataaattagttgaatcctaattctttagtaatttaacctttaacccaattagaaatcataattccttagtgatttcctattaagttaagcattaagctaatacatctattgctctgcaatcatacatttctatccctaggtaatgtaaaaactgtgttattttactgctttcaaaaattagaacttcgacattcctattgtaaaccttaacccttagaacctcattagaatgataaagtctaataaggaataattcattcaagaataaaataaaataaaacaattatcacaatttatattaatatcaatccaattatagagaagtttacattgattctgtctctaaccacagtaaagaaggttagctagacattctcatatctaaccttaagcacagaattagcatatacctagacaagaatttcaaagacaatagaagaagtatacatacttctcaatcttgatttaatcctgtcctgttggccttgattcctcctcctcgttctctcttgcatttttgtgtgttattttctatccaagagtcccccctttgttttctgcacatccatatttatatttagggtaactaagttcttatgctgttctattttttgtgacaaatcttttttggttctgcttctttccttcttttcctgatttctattaaacaaaatatgcataaaataagtaatggaccaagaattgatgaaacttaaacttatcgtaacttttgttgataaattataattaaattattaattattttaacttaaaactattatatgttagccgtatatcattaatttagcagatatatgagaattttaggatgaggacacaatataggaggcatttgattcgagatacttcgtgtggagttcgctttaatgacatggacgatattaatcatgtttttcatcagtgcctttttgccaaatctgtttgaaaatataataatgatgcttagttctttgctgcatgactttttcaagcagaattttgaggattggttggtcacacacttgcggtctgattgtgttgtttggtctatcttatttgtggttcttctggatattgcaagaatatgttgatctttgagaacgttacacaccatccattgagtattatgcacgcatcgtatattgaggcaagtagatgctattggtgttagcttgaaaaaaaatatagtgaatccccgttggcaatgttgtagctggtgtctaataatagtttgaaaaaaataattaatgttatttacctaataatttttcacacatatatattaatttttatcccttttcaatatattatttgaggtttcgtagttttacacaaactctccttctttttttaaatttatagtaatctccttataagaaaacataatctaatgtttttaaaacaattaaaaagagttagtgtaatgtatattagaatgtttataaatgtatattttttcaacaatcaaggtgatttgtataggagtagaaaaagtaagatgagtttgtgtaatttcaataaatcgctggataattagtgtgatttagactattatttattttatcacacaagtttctcttttatcttcatatgttttcctctcatctataaatttgatatacttttactcatcgtgttactaaggtgaaatattcattatactttattgataattaatctttattannnnnnnnnnnnnnnnnnnnnnnnnnnnnnnnnnnnnnnnnnnnnnnnnnnnnnnnnnnnnnnnnnnnnnnnnnnnnnnnnnnnnnnnnnnnnnnnnnnnnnnnnnnnnnnnnnnnnnnnnnnnnnnnnnnnnnnnnnnnnnnnnnnnnnnnnnnnnnnnnnnnnnnnnnnnnnnnnnnnnnnnnnnnnnnnnnnnnnnnnnnnnnnnnnnnnnnnnnnnnnnnnnnnnnnnnnnnnnnnnnnnnnnnnnnnnnnnnnnnnnnnnnnnnnnnnnnnnnnnnnnnnnnnnnnnnnnnnnnnnnnnnnnnnnnnnnnnnnnnnnnnnnnnnnnnnnnnnnnnnnagagagagagagagagagagagagagagagagagaggtggacggaagtagaggagaaggggggcaagtgccccctccttaaatttgcccatgaaattagttatatgcccttcatttttattatttttttcaaaatatcataggtcttaaaatttgagagcagttttttaaatttccttttctcttctgtcattcgttttcaccttcacgctccaccggcccttgttacatttgcaacccttctcttctcgcgtccggcgacaacttcctccacggctgacgactccacggaccgtgcctgcgcctgcgactttgctcctcctccgtggctccgctccgcctctgctcacgggagtcacatctagtgcctagtagattgctcctcggctcctcgcgtgcgcttcctaagctcgggccttccacaattccacttccaggttcactttgtttattttttagttttccccaatcaaattttgattttgattttcctgaaaaactagtggttaactggttattgttattgttgtttttgattacatgttgctatatatggctaatgggtttgaacatgttgtgttatcaacaatcagcaattgaggctttttttatataaaaaaaacatatagcaattgagagatggtgctgttagcctgtcacagtgttagtgtgttactaattgatttggggttatgatattccattattccctaaaaatcaaaagtacaaacaaactgttttttggtgcctctattaatattgtgaattgtgatagactgataatcgagggcagaactttaggataaacaatttagacactttttttacaagtgaagtggtagtactaatatttgaaagtattgataataagacaattatgaagaaatttcaaaaaaataaggcctagaaggatgacattgtaattatttttctaaatatgtatttaaacttttgaatactccgttgatatatttttcatttcggtaatatactactttttttggtttaattctttataattttttaaaatggaccttgtaaaatttcatttttggttttagtctttattattttattttagtagttctaatgcactattttttattttatttcttataatatatatttattttaaattagtctctttgaaaaatatttaataagaattaaaagcaaataatctacatattacaaggaaaataaaagaaaataaatatattataaggattaaaataaaataaaaaagaataaacctaaaaaagtttgcaagaaacatttaaaaaataattttataaggaaaaaaatattataagaattaaaaatatatttaaatcatatatctgaaatgtttttcatttaaagggttttttctctctattcctatttttaaaaattcaaaatttcacttttttaaaaaaataaaataaaaacattggacgagttttaagcataacttaataaacactcccaaaaatatcgaccgtaagtgcgcttttgttcaatttgtagggtacacgtgctcggtctttcacatagtgaccatgatcaagcttttctgctatttcattataatcgtagttgtaaaatatggtgagataattactccgattgagacaaaggtttagtagattagtactctaattaatgagtgagtaattaatctaatttgatatgatatatatatatatatatattataaatttaaaattatatatatgtatctaatattatttgaataaaaaatatttattcatattttaaaatctaaaataataattgataataatctaaaattttaaaaaataacaaaaattataaaaccaattaggttggattagaaatcagtgcctaccaaactaagtttgactagatcattctagattaaccgtataatcagtctaatagtaaaattgatttaactagatcatcaggttatggtcaactagtcagaccgtactaaaaaaatgcgatcacccagacctttcaaatacttaatctaatacaaaaatcctgtatacgaaatttcttcagttgcttactcgacctaagcaagccagattataagctgctctctggaggcgcatagattggttgaaaggtttaaaagagaacattattttaggtttagggggactgattataactaatacattgattctataatttttttagaatttctttttccataagaactcttttacattgtcttttatataattactttttgctaaaatactattaattattttgcatgtatttaacaaaaaaaaaagtttaattgtacactaccactaaattataattatttcatgaattttcgatcaatttgaatttttcacatattttatcataacaattttcaattttgctcattttactgatctattattaaatgtgtaatgacattttgacatgtccttaaaaacaatttaaaatacaacgttgtttggtaacaaattaaacaactgtgattttacaaaaaaagataattagaaaatgacagttgttttgttttagtttctagttttttagggacacatttaaagaatctgtaaaataagcaaaatatatatatatatatatataatgataaaactcatgagaaaagcttagatgataaaaattgtaaaacaatgataattggaggattatgcctaataaatattcaatattatacattattaagatagtctctcttgcaagcatgagaaaagattattagtcacagtaagataaattatactccccgtgttctaaattaactgaagttttagcattgaaagaaaaaatcatagtggcttatgcttgctgttttgaattaaatatattaaataatctattccaattttaccttctaactaaatgacttgttagttattatacatttattgaaattaaaaaagagtataagaatattttaataaaattgtcccttaatatatattattgtctggaaatttatgtgtgaaaaacttttaaacattcttcattttggaacccagagagtatcagctaatattatactattttaaatacacttttgtattaataaaaaattattagaaatcataaaattttgagtcttacgttatatataggaaggcacgtggtagctttgagcgtccaacattttgtactttaccataatcacccaatagctcaaacatggttttcactaagctttcattaattcgtctaattctctgttcactcgtaagcctccattcctcccaagttttcacgttttcttcttttgcctttgctgccatcactgcttatgaaggttcggaagcaagtgctctacttgagtggagagctagccttgacaaccatagccaagcttctctgtcttcatggacaagtggtgtcagtccttgcaggtggaaaggaatcgtttgtaacgaatccaacgctgtgaccgctataaatgttacaaatcttgggctaagaggtactcttcacactctcaacttctcttcctttcccaagctgctaactctggatattagttacaacagttttagtggaactattcctcagcaaattgctaacttgtccagagtttctcagttgataatggatgataatctttttaatggctcaatccctatctccatgatgaagttggctagcttgtcattgctaaacttagcaagcaataatttttctggctacattcctaaggagattggacaattggggagcttgaagtatttattacttggatcaaataaactttctggtaccattcctccaacaattggaatgttggccaacctcgttgaacttaatctgtcaagtaactctatctctggcaaaattccttcaattagaaacttaacaaatttagaagcccttaagctctcagacaatattctttctggccccattccaccctacataggagacttggtcaatttgattaatttggaaatcgatcaaaataaaatttcaggatcaattccttccagtattggaaacttgacaaagctggactatatttctattggcgataacatgatttctggatcaattcctacctccatgggaaacttggtcaatctaaagatcttagacctttctgaaaacagtttttctggagttattccttccacctttggaaatttgacaaagctcacctattttctagtttttgataacaaatttagtggtagattaccacccggaatgaataactgcaccaatttcaaaagcttacaactatctaataacagtttcactggccctttgctgcaacaaatttgccttggtggttcacttaccagatttactgctgactataattatttcacgggtccagttccaaaaagcctgaaaaattgctctagtctttacagactcaggctagatgtaaaccagttgaccggaaatatatcagatgtttttggtgtatatccagagttggactacgttgatctgactagcaatcacttttatggccacatttcaccaaattggggaaagtgtcctcgtctcacaggacttgtgatgtccaacaacaatttatctggtggtatacccccagaactcggccaggcacccagcttacaagtactagtcttgtcttcaaatcatctaacaggaaaaattccagaagaacttatgaacttaaccactttgtcgacgttatcaataggcgacaatgaactttctggcaacattcctgcagaaataggagccttgtccggccttacaactctcgagcttgcagcaaataatttaggtggcccggttccaaaacaggtgggagagttgcgcaacttacttcacttgaacttgagcaagaatgaattcacagaaagcattccttcagaatttaaccaattgcaatctcttcaagatcttgaccttagtagaaatttgttaagcggaaaaataccagcagaacttgcaactttgcaaagattggaaacgctaaacctctcacacaacaatctctctggagccattcctgattttaagaatagcttggcaaatgttgacatatctaacaatcaattggagggttcaattcccaaaattccagccttccttaacgcttcatttgatgcattgaaaaataataaaggcttgtgtggaaatgcctccggtttggtgccttgccacaccccacctcatgataagatgaaaagaaatatcatcatgttggcattactgctttctttcggcgctctatttctattattattggtggttggaatttcgttatgtatttgctaccgaggagcaactaaggccaaaaaggaggaggataaagaagaaaaaagtgaggatcattattccctttggagttatgatggaaaaatagtgtatgaagatatcatggaagccacagaggggtttgatgacaaatatctcattggagaagggggaactgcatctgtctataaggcaaaattaccctcaggacagattgttgctgtgaaaaaacttcatgctgcacccaacgaggaaacacccgattcaaaagctttttcaactgaggttaaagccttggccgaaatcaagcaccgtaacattgtgaagtcacttggatattgtttacatacacgcttctcctttttggtttatgagttcatagagggtggtagcttggataaagtactaaccgatgatacgcgtgcaacaatgtttgattgggaaaggagggtgaaggttgttaaaggtgtggcaagtgctctgtaccatatgcatcatggttgctttcctcctattgttcatcgtgacatatcaagcaagaatgttcttatagatttggattatgaagcccgcatctccgacttcggaacagctaaaattctgaatcctgattcacaaaatataacagcgtttgcaggcacatatggatattctgcaccaggttaggccatttttgttcttaagaatttaatcctatatatatacttgtttcaataataagtcctgctacttgttttataatactatttttattattttgataaattacagagcttgcttatactatggaagtgaatgagaaatgtgatgtcttcagtttcggagtgctttgtttggaaataataatgggaaagcatccaggagatctcatttctgcattgttttcatcatctgcttctaatttgctattaattcatgtgttggaccagcgactacctcagccagtgaagccaattgttgaagaagtgatcttgattgcaaaattaacatttgcttgcttaagtgagaatccacgctttcgcccaagtatggaacaagtgcataacgagtttgtgatgccaaaatcatcttctttggatccactccccatgatcacacttggtcaactatctaaataattgaaacttgttttctggtgtgttctatgttttttagttttttggtgtacactgtaattaagcttttcgtgatattaatgtttttctcgagcatgttttgtatgtttctgagggagtgctttgtatgtttcttctgttctttaaagacttggaaaataatggaaagtcgcttatgtcttttgtaagatcgaataaataaagtgtgattttgaagggagcagtcatgtttttggtctttataaaataaataaagtcattatatatatataaagctactttatcaaaagaaaaaagtaatgtttttggtaagataaggatattttgactgcatatttctttgagaattatttgacgttaacggttagccactcgatgaagtatattgcatttaattgaagacactcccaagttccattatatatcaggactttagtaatctacaagaaaactcgtataaggatattttgaagaataaatttgaatacaaatgttatatattttaattttacacaaaactattatacggatcattttattttttnnnnnnnnnnnnnnnnnnnnnnnnnnnnnnnnnnnnnnnnnnnnnnnnnnnnnnnnnnnnnnnnnnnnnnnnnnnnnnnnnnnnnnnnnnnnnnnnnnnnnnnnnnnnnnnnnnnnnnnnnnnnnnnnnnnnnnnnnnnnnnnnnnnnnnnnnnnnnnnnnnnnnnnnnnnnnnnnnnnnnnnnnnnnnnnnnnnnnnnnnnnnnnnnnnnnnnnnnnnnnnnnnnnnnnnnnnnnnnnnnnnnnnnnnnnnnnnnnnnnnnnnnnnnnnnnnnnnnnnnnnnnnnnnnnnnnnnnnnnnnnnnnnnnnnnnnnnnnnnnnnnnnnnnnnnnnnnnnnnnnnnnnnnnnnnnnnnnnnnnnnnnnnnnnnnnnnnnnnnnnnnnnnnnnnnnnnnnnnnnnnnnnnnnnnnnnnnnnnnnnnnnnnnnnnnnnnnnnnnnnnnnnnnnnnnnnnnnnnnnnnnnnnnnnnnnnnnnnnnnnnnnnnnnnnnnnnnnnnnnnnnnnnnnnnnnnnnnnnnnnnnnnnnnnnnnnnnnnnnnnnnnnnnnnnnnnnnnnnnnnnnnnnnnnnnnnnnnnnnnnnnnnnnnnnnnnnnnnnnnnnnnnnnnnnnnnnnnnnnnnnnnnnnnnnnnnnnnnnnnnnnnnnnnnnnnnnnnnnnnnnnnnnnnnnnnnnnnnnnnnnnnnnnnnnnnnnnnnnnnnnnnnnnnnnnnnnnnnnnnnnnnnnnnnnnnnnnnnnnnnnnnnnnnnnnnnnnnnnnnnnnnnnnnnnnnnnnnnnnnnnnnnnnnnnnnnnnnnnnnnnnnnnnnnnnnnnnnnnnnnnnnnnnnnnnnnnnnnnnnnnnnnnnnnnnnnnnnnnnnnnnnnnnnnnnnnnnnnnnnnnnnnnnnnnnnnnnnnnnnnnnnnnnnnnnnnnnnnnnnnnnnnnnnnnnnnnnnnnnnnnnnnnnnnnnnnnnnnnnnnnnnnnnnnnnnnnnnnnnnnnnnnnnnnnnnnnnnnnnnnnnnnnnnnnnnnnnnnnnnnnnnnnnnnnnnnnnnnnnnnnnnnnnnnnnnnnnnnnnnnnnnnnnnnnnnnnnnnnnnnnnnnnnnnnnnnnnnnnnnnnnnnnnnnnnnnnnnnnnnnnnnnnnnnnnnnnnnnnnnnnnnnnnnnnnnnnnnnnnnnnnnnnnnnnnnnnnnnnnnnnnnnnnnnnnnnnnnnnnnnnnnnnnnnnnnnnnnnnnnnnnnnnnnnnnnnnnnnnnnnnnnnnnnnnnnnnnnnnnnnnnnnnnnnnnnnnnnnnnnnnnnaatcaaagaccttaactgcctaatcaaatgcattatttcaacacaggcttctttgctttaagttcacgtacttatctcctttttatttttccacttaaataaatagtattaatttagtatttctattttacctctcttttctcttttatccctcactatttttcttcaaatgactacaaaaaaaaaatggaattttcaaaggcaaaattccgtggctaacatcaaaatcacaaagatatataaatttaattttggaccttatttatctaaagcaaaagcaatttgcgattacaactcaaagaggagtcggacttacacgtccctaatccaaaataaacaagaccatattattgcctgagctagaaattatgggaagatcaagggaagccctgttaattgttgagagtttcatcctttggtgagtttcacttctggatttgcattatgggaattgtgacagactccttttttctttttctttttttaatagacgccttcattaatcattatagagctctgtttgacaaagttttatgtttggagagcctcctccctctcaatttaatactttaaggtttgctctgaatttatccgctaatataaagaacctcttattacaaataatgnnnnnnnnnnatgactatctaaactgatggactgggaattgtgagactccttttttctttttctttttttaatagacgccttccttaatcattatagagctctgtttgacaaagttttatgtttggagagcctcctccctctcaatttaatactttaaggtttgctctgaatttatccgctaatataaagaacctcttattacaaataatgtacacactatttcgaaaattcttcaagatacatagtgaagtcacccggggaaggattcaagtcttataaaatttatataaaaatgtgtaaagtgaggaagagtgactatcgatgtagcctttactttcactttttattttataatttaaatttttattcactttaaaaaaggccaacaaaaaaagaaaagggaatgcccaagttaatacgattcacactatgatgttcttgtttctactaaactagtaaagtgacctgtctgacaagttttaattttgaaaataaatatatctatattatacatnnnnnnnnnnnnnnnnnnnnnnnnnnnnnnnnnnnnnnnnnnnnnnnnnnnnnnnnnnnnnnnnnnnnnnnnnnnnnnnnnnnnnnnnnnnnnnnnnnnnnnnnnnnnnnnnnnnnnnnnnnnnnnnnnnnnnnnnnnnnnnnnnnnnnnnnnnnnnnnnnnnnnnnnnnnnnnnnnnnnnnnnnnnnnnnnnnnnnnnnnnnnnnnnnnnnnnnnnnnnnnnnnnnnnnnnnnnnnnnnnnnnnnnnnggttgtgattataatatatattaaaagtcaaaatcatttatcagataattttcaaaatcatttaatttggtaaaaaaaaaaagggtaaattctcggctccattaccatcaacggtgtaagaatgtgcttctagtttcaagctctttctttgtgtttttggcttccttgtaattttgacttctctattttttgtcatggtagtagtggtggggaaggaggggatggtacattgtcccgtaaagtcactaacagaaaaagagagaaagtttaacaaaaaaatttaaatttgagataaaataaaagcttaaagaaattttttttattatgagaaacttatggattttgcaagctactccttaataatttttttcttgactatggtcattgaaaaatagactaattttatatttggtccttgaatttttttattttgtatttttttcctaccattacattggttttgttaagtgctccttgaaatatttttttatttgtcttttggcccctaaaatgttttccatcaattggtgacatctgaaattaacaaaatcaatataacaacattgattaaatataaaataaaatatttttttaaggatcaaaagcttttgtgtagatcttaagcaaagatcttgagcttaagatctgatcttcacaggatctcccaataaaggaagtggagagatctccaacatggagaattggttcttgtacaagatccctcaagatctgcacattattcaaaaaaagaatgaattttttctctctttttctcttccaaagatctcaaaatgagatctaccattaaaggaaaaaaagtgaagagatattgagagatctttaatcctatatggtactatagggtccaccaaaaagtggtataagatcccaatttaagatctaccactaaagatgctcttaaggatcaaatacaaaattgatgatttttttcaataataaaaaaattatttgagcaaaaaataagatttggcatattacatagtttagtttggatgtaccagatttgtattaccaccgcatcagatcatttggagtagcgttattgtgtactgtgtatagttgtttcaattgttttaaatattaaaagaaataattacataaaatcgaataatcttgttatatatatatatatatttatgttaatacttattttgatggtgtatttaaattaagaattgttcacatcgggaggataccataggaaagacggagtaccttaagattcaactgctccctcttaaatactctctccattgtgttttagataacttttaaatacaattattttttatagttttaacacaactattaaagatatgtaattaatatttcaaattttataaaatatattatgtagcattataatatatcctttatttttttggttaattagatttttattcatttgctatagaacaacaattattcttacctaaaaaaggttagtttcatggaattttttttataaaaaaaatatgtttggttacattttaatatccctttgaatatcttttagaattaaaataatttaaataaaaatacattagaaaagaaattaagagtactttagcatatcattatccttattcccatgaaaaaaaaaatctcatttccatctcttttcatgggaatggaagtgtaggaaaagtgtgataaaaaaaaagttagtaacatgtaacaaacatgagtatgcaatattttcatgtagcattcttggggataaacttttatttcgtgaaacaaacataaatgcactctaagagtacttcttggaaaataaaataaatttaatatttcattagttttgtaaaacaatatatatnnnnnnnnnnnnnnnnnnnnnnnnnnnnnnnnnnnnnnnnnnnnnnnnnncattattgaatatgaattgattgaatatcatgtgtgaaaataaaaaaaatgactatctatgttatataatttacacaaagttattgattgaacagtgaaaataaaaaaaataactatcttatgttatataatttacacaaaattatagcatacatggattaaatttatttcaaatagaaaaaaatgaaaacatttgtaaatcatatttgaatgaaattttaatcaattaaataattaattaaatcaaattaattttaattgattaaaatatatttttcttcaaataatggtctactatgaattttcataaatacaattaaatgaaatttaacaaattaacaaatcagtcaaattaaattaagtaaaaagatactctaattaaacttggtaggataaataaagtattactatattttttgttattatttggtgttaaaaatcattaataatttttaaaaaaaaattaagatgaaaagctgtattaatctaaagttattccgtgacacaatttttgataatatttttttaaaacttttctttgcttaaacaatttctgcgattgcagattgaaaaattaaaattataccttttttcttttcttttcgctttcattttctatgcatgatagtgattcttcgaagccaatgacgattgattcttatccgtgtagcaagtgccgtctgaaaagctaactgtttgtacggcgtgtgatgtacatttttcacactgtctgaggctttcgttcgatcttctttattctaaaatctactttcaaaataattcctgaaaagctaactgtttgggtttttttaagtagtcttctttattttattttattttgaaacaattcctgaaaaacttaaagtaaaataagctaaaatcaaatgcattacttcagcgcatgcttgcttccttgattccaatcagttagagcactcttgcaactccaatatgaatgtaattaagtaattgaagttctgttggattaattgaaaatcatctagccccttcttattttcaaccgttggaatatagtgtgattattatctcaaactcacccaaattgaaccaaattgcaactgattggtttatggtaaagggatgttggactatgcaactccaagagaacctgatcaagttggtgtcttttcaagtttggtacagatatggtgggaagattgtattgaatggcaaattatacaaatctttcaaatatttagtattaacctttttaaacttcaccccactgtgactcatgtttgatttgtctatatctaacccatcttagataaagactaagtatcataaaaccagcaaaaaatcttaacaaatctgccacttcctactggtttagttattccaacaatctctaaaataaaaggccatgatcctcaacaaggtactattgaatatacaatgagcatatttcataagcaaaggaaggtgaaacagaacttacacagaaaaaggcaaccgtccctgttccaaaataaacaagatttgacctataaaataacaccatttaacaataatatgcataccgcttgagcagacacaaatgaatctaaagtcacatgactatctaaactgatggactgagttaaagtattaggcactttcattgtaaataactggcatgtgcctagtcatgctgccttgtatgcacgtactggttgtatgcaaccaaggttttaaattacggtcaggtcccgttagagtttcattgcagtatttgatgttgtggcagcgttgattttatactgcaacagaaattgtcattggataccattttttaacaccttggctgaaacaagaagtgcatggtcaaggaaagtgggactaatatgccaatgtattttacattttgtttctttaagcattgtttcctgagggaggaggaagctagcaaaattctaaaatgtgaaagttgtagtaacaaaacaaacaaaagatataaagttagggacggtgcctaagattgaagaagtccacactccacaatgttgtacttgtagacctaaatttcagatgcctgacagactcacgtggttgtttgctttgagcatattccaccctggctgctggcaaatatatgtaaaacttgaattgtgttgttgcctgagattgaaatggaagatagggtcaagcggatgatgtggatgcgatgtttcaccaaactggtggagccctgttatccaacatttttttgaaacccccctgttatccaacgttggtgagtttcacttttggatttgcattatattaagagtttgaaaagttttccctttggagagcctcctcttattcgctaatataaaagcctctttcttatcaagaatgtacacattcttgaataaagccttcaagataatagtggaagactaattaaggtcttcaagatatacatagtggaagactaagactcaggcattcagctcttataagtaaaaactaacgtgtaaagtgagaaaggaaacagtattgattgtaccctttaattactttcactctttgttttatcactttttaaatttttatttactttttaaaaggaaaattaaaaaaaaaagggaatgccaagttaatgcatttcagacgatgatgttcttatttccttattatttttataataattgctttaaaaatctatatatattcttgtccaattatatttttaacatataaatttataactaaagcataaaaaaatattcaaacaagaaaaattaaaaaaaaaagcatatataaaatacttcatctacannnnnnnnnnttttcaatagcaatcccccagctgacaaaggcaaagccatcaatcaaacatgtcggttaatcaaatttttgtttgcacggctctgttgacaccaggggcaattatgtcaggctgaaacagaaaataaagtattgaatgtaagaaaatggaaaagaaaaatatatcatgaagatgaaatgaaatgtagaccttgagtatcaatggttgcactgcattgggacccctggatgagaatccagccacaattggagcaggctttattcctaaatatgttcttgctacagtcatgtaagcaacaagtttcctgcagagaaatttatagattaagtttttcatttgctgcaagtatttttacaatgtaagtaacactgaaatgaaattggcttagtgtctgtttgaattcatgtcagatcatccaaaatgaccttgaaataccaactttcctgattttaaataaatatgtacatgcttggtctcccgttggaaaattgattctgaatcccaaattaaacaatttatccggtggtaaaccgccagagcttggccaggcacccaaattacaacaacttcaactctcttcaaataatataagtggaaaaagtccaaaaggttttcgtaaattgaccctgttgtttactctctttgagtcacaatgaattttctaactacattcccacagaaatgggatctttgctaaaccttcaacatttgaaacttgcagcaaatagtctaactggtccaattccaaatcaacttggacgactgctcaagttaattgacttgaatttggcaataataaattatcacatggccttccctctggatttaactaattgcagtctcttcaaactcttgatctttgtgaacttgttaaatggacaaataccagatcacttggaaagttgcacagattggaaaatttgaatctctcacacaataatctctggcaccattccatccaatttttaagaaattgttaagtttgacaaatgtttacaccaacaactaattagagggtccaattcctgataatgttgaaggtcacggctatggtactgctaagggaggctccccaagagcaagcgttgtggcctacaaagcgtgctggcataaactggataccagagggtgccatgaagcagatattctacaagcatttgattatgccatatatgatggttttgatgtcatctctgcctgcctccgtgggtgcgtctaatccctataccgaagctttgttaacagatgggatatccataggggcattccatgcagttgccatgaacatagtcgttgtttcctctgctgggaatgaagggccatcacctttaagtgtcacaaatgttgcaccctggtccttcaccgttgctgctagcacaatagacagggattttctcagcgacatttctctcagcaacaatcaatccattacagtatcatctttctatacttttccttaatttattaattagtttcatatgtttttattatgtacgtcaatttaattaattggaacgtgtgtgtatatatcagggtgccagtcttaatcgaggcttgccaccatcgtcaccgtcgaacaagttctatcccataattaattctattgcggctagacttcctcatgtgtctattaatgatgcgtaagcacaatttttgtttttatttccaaagcttgcttcaaatatttatatgtacttgtctcatacgtgtatatgtatgtatgtatatttgttggtgtagtcgtctttgcaaagcggaaacacttgatcctagaaaagtaaggggggagacactagtatgccttcgaggtgataaattaacttcagttagtgagggccaacagggtgctcttgctggtgctgtggcagtttttgtgcaaaatgatgagcaaagtggaaatttacttctggtcgagaatcatgtattacctgctgcaacccataatgaaagtcaaggagatgctgtcaagtttaaacatcagcagcaagtaaagttcatatatatatatatatatatatatatatatatatatatatatatatataaacacttaattaatttctacatgtattgttgcaggggggtattagcttacttgagagcggcaagaacatatataggagtaaagccagctccaataaaagctggattctcatccaggggtcccagttccgtgcaaccattgatactaaaggtctacttacattttgttacaccaacatgacatgatgattttccttcttacaattaatgactcatgtaagataaacttgccgtaatgtgtttctttttcagccagacataactgttcatgttgtgaacataattgcagcttttacacaaggagcaggtccgtctaatattgcatcagatagacgtcgatctcttttcaatgtgcaacatggaacttctatggcttgttctcatgtcgctggcatcacgggtcttctcaaaacgtaccatcctacttggagtccagcagctatcaaatcagctattatgatcattggtactaataattctatttatatgtaaattctcaatttaaattatataataattatttttttcttcttttaatatttcttttgaaatatataaatttagttttttttgaacttttatccaataaatcctaaaattaattgatttttagtgtattgattgtattttttttttgtataattacacattaaaaaacttgaaagatgaattgaggatatggacttaatgcgtcaccaatataaaaaagtccaattaaacaagttttgattgtgaaaaggggaggagagaaaaatcatcaaaagtcagaaacctaagacataaaggagagaaaaattcacaccaaaaaagttgacttatgcctcttatttaatcggtcttcttgcattttctttcattaattattttttccttttgtttttgtaaggctctctgacaaataaagactaaattctacttggagtcgaactatcaaatcagctataatgacaataggtacattaatattagctatagtaatatatatgcatttttaattacaaaatactatcatatgtatgcagcatatcatttggacaaacattggaggcttattaattaacagctatgctttttatttacttcagctacaacattagataacacgaatcaaccaattcggaatgcatttgataagaaagcaacccccttcgaatacggcgccggacaaattcagcctaaccttgcaattgaccctggactcgtttacgatttacgcaccaccgattacttgaacttcttatgtgcttctggttacaaccaagctttagtcaagttgtttaattttaattggggaaagtaatttattaggggattcaaaattcttcaatttaaaattcactatttggatatttttatataaaaaatttaaatttttggaattttataacataattttaaacaattaaaaatgtggaatttgaatttccctctaaaaggtgagaaattaaaattctcttcttttttagaagctctaaacgcacaattttttgctacgtctcaatcaccgacatactccaacctccgctactctcaagacaccatccatcttacgtgtttttttcgtgaataaggttcaaaattttaaaaatgaagaaattcaatttctttatccaaacacaaaattttgaaaataaaagaattttaattgatgcattttaatttccctgaattttaaatttcctgaaattttaaaatactccatccaaacatactcttagagtgtgtttggatagataattttaattgggaaaagtaatttattaggggatttaaaattcttcaatttaaaattcactgtttggatatttttatatgagaaatttaaatttttggaattttataacataattttaaacaactaaaaatgtggaatttgaatttctctctaaaaggtgagaaattgaaattctcttcttttttagaagccctaaacgcacaattttttgctacgtctcaatcaccgacatactccaacctccgctactctcaagacaccatccatcttacgtgtttttttcgtgaataaggttcaaaattttaaaaatgaagaaattcaatttctttatccaaacacaaaattttgaaaataaaagaattttaattgatgcattttaatttccctgaattttaaatttcctgaaattttaaaatactccatccaaacatactcttatagttttcccaagtcttacagaattgaagatttcaacaatccttcaattacggtgcatcatcctggctcaaagactattaatgttacttgtacagttagaaatgttgggcctccaagcacgtaggttgtgaataatcactggccgaagggtattaaggttcctgtctgttgcgaattcggcaagtataccgatcgttcaagtaataaaatgattagtgagttatcgttcccacgaggattgtttggtcaattaaatcataaatcgtatctcaaggttggatgacaaaagattaagagagaattgtgttggacaaagtaattcaaaaactaaatgtaacataaacataaacataaagcattatatacaagatagatagtggttgtaccaaacgcaacctaaagtaactagggaacccacattcaacactcctagcattcttcatggattgattgcaacattcatccacaccatctactgtaatgaaggcagatgtgatactgacgtgcggataaggacaaaagcagaaattatgagagagagatagtaacagaaaagagagagagatagatattctgaatattgctatccttttttttattgagcctccaagctatttataatattctcgacaatataaaactagacagtattttaaaatatctagctaggcactagattaactattgaagcataatggacccttctcagtctaaaacgtaatcttgataacgtgctggtatcttcctcaatctattattatcttccttgttagcaattggatttgggctcatcccacagtctgttacatcattccctcctgcaaaacttgacttgtcctcaagtcgtggtagatattttcccaagacaggtgtaaccaacggattcgttggggtcgacaacttggatgtggaagatagctggttagcatgagttaccagggatggctcagatggtgccaatggaaaagaagaaatctcaaccgctggaatttgatcttgatcggatggacttttggacttttgtaacagagggatagatgtagtttttgtctctggtttaagttgcttataagacaaaagcggatcacttttgttcttgtcgtgaggcataatctgatccttcgttaaggagggtccttttgctatcatctccgaacccggcaaggagtggtttgtgtgactcaaaaccacatcttggtcctcccatgtggaatcctccaacggaagatcggtccattgcaccagaacctgaggaaccagggtattcttgcgccatatttgtctagtactcactattgcttgtggcgtatgcaacagggggtcatgagtagtcgttgccggaaactgatgaatcttataacgatggcctgagcgaaagggacgaagcagagaaacatggaagacggggtggatcttcgccgtaggaggaagacgcagccgatatgctacagagccaatgcgttcttcaaccacaaatggaccataataacgcaaagccaacttctgagacgatcgtcgtgccattgaaatctgacgatacggctgtaaacggaccaaaactaattcgcccacggaaaggtgccaatccttacgccttttgtctgcttgtgctttcataacctgttgagatctgaataatttttctttcaatgttcccatcatcttcatgcgatcagagagagtcgtgtcgactgcttcgttggatgaagcaccaagacagtaagctaaaagatttggaggagtgcgaccgtacatagcctggaacggggtagtgcctgtagcggtgtggaaggacgtgttgtaatggtactccgccaaactcaagaacttcgaccagcttgaagggtggtcatgtgagaaggcgcgaaggtaagtctccacacaacgattaacacgttctgtctgtccatctgattgaggatggtaactcgaactaaaattgagctttgtgccttgtaatttaaacagggaacgccaaaaatcactgaggaaaattgggtcacgatctgagacgatggactccggaatgccatgaagtttgcctatgtgatcccagaaaagttgagcaactttggatgccgaataagtggaaggaagatgaacaaagtgtgctgccttcgagaatctgtcgactaccaccaaaatcgcggtgtaacctgcagaagaaggtaagtgagttataaaatccatactcaaatgactccatagggtgtcaggaagttgcaagggttgtaaaaggccaagtggtggatgatttgaaggtttcaatttctgacaaatttcacaattttgaatgtatgttttgacatccttccttaatcctttccaggtgaaatttcgcgttatgcgctggatggtagcttgaacacccgaatgccctccttggactgagtcatggtaatcatggagaatgatattggtcaaggaagaacccgctggaatgaatatacgagagtgatgaaaaaggaggccgtttctgaaactccaatccgacaaggaagtggaatttagttgtaaatcttgtataagctgagtagaataaggatcggaactgtattcggattgtaactgagtggtataattaagctttggaacagacatggccaataattgggatgactgaattgcaggattcccgtctggtagtcgagacagactatccgccaccgtattagttttgccggccttgtaagtaattgtgtaattgaaccccaacagtttggataagaactgttgctgctctggtgtttgaataacctggttcatcaagttatgtaaacttttatgatcagtgcgaattgtaaaatgggcaccaaggagatactgtctccacttggtcaccgcggatgttatcgcaaacatttcgcgaacatacactgattgtctctgcatggtaggagaaagtttcctactaaagaaagcaataggcttctcgttttgtaatagcacagcaccaattcctatgcctgaagcgtctgtttccaccacaaagggttgggtaaattttggcaaagtaagaattggggcggataccagtaattgcttaagacgatccagcgcttccgttgcagccgtagtccaacgaaactcagccttagcaagaagatcagaaagtggagctgcaatggatgcatatttctgaatgaatttgcgataataccccgaaagtcccaaaaatgctctgacttgagtcacgttagttggaatgggccagtataaaatggcttttaatttatcagggtctggttgtactcctttgccagaaataatatgacccaaataaggcactgcagcttgagcaaaaaaacacttctcctttttagcaaataaggaatgagatcgtaaagtgtttaagacagttgtgaggtgatcaacatgttgctgaggggattgactgtacaccaaaatatcatcaaagaagatgactacaaaacggcggagaaacttggaaaacacattgttcattgtagattggaaggttgaaggagcattggaaaggccgaaaggcataaccaaaaattcaaaatgtccatgatgtgttctgaaggctgtcttatgaatatcatcaggatgcatcttaatttgatggtatccagagcgcaaatcaagcttggaaaacaccatggcaccaccgagttcatccaacaattcgtcgattgttggaataggaaacttatcctgaactgtcacagcattgagggcgcggtaatcaacacaaaaacgccaagtgccatccttcttcttaaccaaaagaacaggagaactaaaagccgaatgactatgctgaatgattcctgcttgtaacatatctgccaccattttctcaatttggttcttttgatagtgtgggtatctgtagggccgtacttgtataggctgtgaatttggcaacaagtgaatttgatggttataagccctttcgggaggtaatccggaaggctcctcaaaaacatcatagaaactgtccaatagcaagtgtaagtccggtagtaatgaacttggaggatgggatgaagtatcagaaggaaccatagtagtggctgtggaaaggcacatgagacaagatgaaatggaatcctgcgataccagtttgcgtaactgagaaggactaatatggctgggtgtggctggtaaatcgccagtgatacaaacttgggctttattccacacaaatgacatagtaagagcagaataatcagttaaaacagggcccaatgtggacaaccattgtactccaagaaccaagtcagctcccttaagatcaatcacgaataagtcaacagtaaacaaatgagattgaatgttcacaacaatagccctacaacttgcagaacatactagtgcatcgccattgtttgatgttacgattatcagcaaactgctcctcatatatttttgcaaaagcgaaagttgctgtgacgtcttcgggtcgatgaaccaaaactgctctccgaatcggaggtttaagtcccgaaatgaaaaggctcttgcgagttaaaggtgttaactcgggaatccgattagcaaggatttcaaacgaggattgaaactctaaaacggaaccagtctgttgtaatttagcgagagaccccaaaggatcttcaaattcagaaggaccaaaacgctgatgaagcgccgtaacaaaagaaggccaatcgggaagctgacccgtgccaaacaaagcttcgaaccaacaagaagcaggtagatccaaattgaaagaaactaaatcaagtcgatcttgaacaggaacttgatagtatcgaaaatacctttcaatggcaaataaccaaggaccaggatctcccgacccgaagcgaggaaaatccattttcatggaacgaatcggatgggcattacgtccaggagaggtacctaaaaggccaccctggttgttcgttgctaactgagttatctgggtctgcattgtttgcaataaggcgaaaaggtcctggacctgacgattgaggccctccaatcggtgagtatgttcctcaaaacgttggttctgggcaacctcaaaggtctccaaacgatgatccatcgttctctccagtgtagcaaattgttgctcatgaacatgaatttgattggttaaatcgcgcatacgagtgttgtcagccatagttcaggaatacaatgaaagcaccgatgtaatgatggcagatgtgatactgacgtgcggataaggacaaaagcagaaattatgagagagagatagtaacagaaaagagagagagatagatattctgaatattgctatccttttttttattgagcctccaagctatttataatattctcgacaatataaaactagacagtattttaaaatatctagctaggcactagattaactattgaagcataatggacccttctcagtctaaaacgtaatcttgataacgtgctggtatcttcctcaatctattattatcttccttgttagcaattggatttgggctcatcccacagtctgttacatctacccaatcatgcatcctcattcaatattagttaggccctaattccttagtgacttgtaaccctttaaccctttttcataccctaattccttagtggtattttattaggttaagcattaagcgatacactataagattgcaagcacccatccctatccctaggtgatgttagcaagtcaccacacttggttccaagactaaggccccaacatccctattgtgaaccctagctctaaacactcaactagattgatcaagtctagagaagagaaggaaacattcaagcaaagtgtaatgaaatagcatagcattaatgaacattcaatacaatccaatccaaatgtaagttacattaaatgcttgccctaaatacaagaggaactagccaaacctaacaaggatggccttggtacaacaaaagaagcatgaatggctgagatgtaagcaaggagaggaagggaagagggaagaaacctcttcccctcacacccaagccctagctaagcttccaagcctctccttctcccttggtagtgattttcgtccaaaaggggatccccagaactgaagtgggttcttgtatttatacttgggtaagtgaaatcccaagattggcccttgacagcattgcagaactgcagatttaagatctggcgcgggtcgcgcgggtcacggcgctgatggcgccactcttttagcattggcgcggatggcgccaacttccagaggaaatctgttttctagagcagcacccacgcggatcgcgtgggagtccacgctgatggcgccaactggaattcatggcgctggacgcgtggtgaatggcgcggatcgcgccgcatcttcttgtctgcttttcttcttctcttttgctcagttttacctgccaattacttcaatcttgaccaaaatatgtcattaaagcttatgaatcatattcacaccaaatggaagctattatcatataaaatgatgcatttaatggcttaattgagcttggaaacatcatgtgctaggcacatatcactgtccaaccaagttcgttgacttttaagaaaactggagaaaaaaagaagtttcaggttattcttcaggcaatattaattggtgtgcctagtcacaacattcctttatttgggaatttgtcttggacagatggcaggcacagagtaaccagtcttgttgtaatgctgtaatgtaaccttagaagttagaagttgctctcagcattgttatggtatcattgtcacttaagtgtgtttgcattttctttttttaggctgtaatataagcgtgtttcctactcctgttgtattaaactttttctaaactaataggcaggtttaaaattttgaggtattgaactttgttgcatttattgggagctatgtttgtaatgggcacacactatcatgtatggaacctgtatctttgaaagtctaataggcattgttgagagttgagacccatatctaaataatattgaacaattttaattaggctctaaatctatcaatttgccttcaccgttgatttctcttctttctattttatctcgtgcagtcatgcattcatcttcacctacctttagtgttagctgttgatgaactaggatgaattgaattttataaaataattcataatttaaaatcaaacttaaaataataatatagagacaagagataaataagacaattaattttaacgtgaaaaatccaattgggaaaaaatcacgacgtccaaattggataaccaatccaatgaacaacttcaatatgataattttgtgtacaagagtttctatcctagtttctcaattatgttgatcttcataaatccaaaatatcagtaacttcaaaatatcaaataatcaaataattatcatcagtgcaataaatttaataatgtgacattcattgtttgttatcatcaaaattttataaatttttttatgcattaggggttcaacaaatatccaacaatttctctctttttgatggtgacaaataattaatgtcatgtactaattgaatgaacatatatactatgaatgcactatgaatgaatgatattcaactttatctactaatgattttcaactattctctagtcttgctaagctatgactagaatcaatgactcacaacaatctaccataacatggcattcaaacctcttcccctcttttggcatcatcgaaaagattaaaacaaataaccatgatagagagaatgattaggaatcttagcatgaataggattacatggggagaacaacatgaatatagttaacaatgaagaacaagaaagtgataaagataaaagacggcaaagaaattaacattctaaaacacatgccttaatattgtaataaattgtcttttcgttcatatttaggatcactttatgttcttattctcaagacttttcataagcttgtacatcatgactgctctccactcttagtatgaaaatatttcataagtcattaaatcaataggtctttataagcttgtaacgtacaaggtgaataagaaatacacaaagaataaagtgagataggaaacaaataagtatagtactgatatgcatagtttttcattttcctctccacttaatacttnnnnnnnnnnnnnnnnnnnnnnnnnnnnnnnnnnnnnnnnnnnnnnnnnnnnnnnnnnnnnnnnnnnnnnnnnnnnnnnnnnnnnnnnnnnnnnnnnnnnnnnnnnnnnnnnnnnnnnnnnnnnnnnnnnnnnnnnnnnnnnnnnnnnnnnnnnnnnnnnnnnnnnnnnnnnnnnnnnnnnnnnnnnnnnnnnnnnnnnnnnnnnnnnnnnnnnnnnnnnnnnnnnnnnnnnnnnnnnnnnnnnnnnnnnnnnnnnnnnnnnnnnnnnnnnnnnnnnnnnnnnnnnnnnnnnnnnnnnnnnnnnnnnnnnnnnnnnnnnnnnnnnnnnnnnnnnnnnnnnnnnnnnnnnnnnnnnnnnnnnnnnnnnnnnnnnnnnnnnnnnnnnnnnnnnnnnnnnnnnnnnnnnnnnnnnnnnnnnnnnnnnnnnnnnnnnnnnnnnnnnnnnnnnnnnnnnnnnnnnnnnnnnnnnnnnnnnnnnnnnnnnnnnnnnnnnnnnnnnnnnnnnnnnnnnnnnnnnnnnnnnnnnnnnnnnnnnnnnnnnnnnnnnnnnnnnnnnnnnnnnnnnnnnnnnnnnnnnnnnnnnnnnnnnnnnnnnnnnnnnnnnnnnnnnnnnnnnnnnnnnnnnnnnnnnnnnnnnnnnnnnnnnnnnnnnnnnnnnnnnnnnnnnnnnnnnnnnnnnnnnnnnnnnnnnnnnnnnnnnnnnnnnnnnnnnnnnnnnnnnnnnnnnnnnnnnnnnnnnnnnnnnnnnnnnnnnnnnnnnnnnnnnnnnnnnnnnnnnnnnnnnnnnnnnnnnnnnnnnnnnnnnnnnnnnnnnnnnnnnnnnnnnnnnnnnnnnnnnnnnnnnnnnnnnnnnnnnnnnnnnnnnnnnnnnnnnnnnnnnnnnnnnnnnnnnnnnnnnnnnnnnnnnnnnnnnnnnnnnnnnnnnnnnnnnnnnnnnnnnnnnnnnnnnnnnnnnnnnnnnnnnnnnnnnnnnnnnnnnnnnnnnnnnnnnnnnnnnnnnnnnnnnnnnnnnnnnnnnnnnnnnnnnnnnnnnnnnnnnnnnnnnnnnnnnnnnnnnnnnnnnnnnnnnnnnnnnnnnnnnnnnnnnnnnnnnnnnnnnnnnnnnnnnnnnnnnnnnnnnnnnnnnnnnnnnnnnnnnnnnnnnnnnnnnnnnnnnnnnnnnnnnnnnnnnnnnnnnnnnnnnnnnnnnnnnnnnnnnnnnnnnnnnnnnnnnnnnnnnnnnnnnnnnnnnnnnnnnnnnnnnnnnnnnnnnnnnnnnnnnnnnnnnnnnnnnnnnnnnnnnnnnnnnnnnnnnnnnnnnnnnnnnnnnnnnnnnnnnnnnnnnnnnnnnnnnnnnnnnnnnnnnnnnnnnnnnnnnnnnnnnnnnnnnnnnnnnnnnnnnnnnnnnnnnnnnnnnnnnnnnnnnnnnnnnnnnnnnnnnnnnnnnnnnnnnnnnnnncttttcttttttctttgctttagaaactatgcatacccacacctaaaagaaattttttaatcaaaatacaaagggttgcatattgtgactagggatataaaatactgaaatgattaacttgaaaggctcaaacaatcaaagatgacctatatcattttcaataaacttatgaaacatcttaaacgatgagccttgagcttcaatgatacaagttctaaattgtctatctcacagagaaaatacacatgcacattattcttcacaatatagaaaattcattacaatatcaaaacatgtacttaagaattaataacacaagaagatatataaagtgaacgatgtaacatagatacatgaatatagaagtgagagaaataagataatccaatataagctaaacaaacgttattagaattggtcttcttttatgtaagacttgttctttttataagccagaaaaaataataaatatataaaaatgacgttcccaatttctcaacatcaaaataaaataaaataaaaataattcaagtgagaaatcgggtttgagaggtcaagttctctacgtgaacagtaatggtgctagctgtnnnnnnnnnnnnnnnnnnnnnnnnnnnnnnnnnnnnnnnnnnnnnnnnnnnnnnnnnnnnnnnnnnnnnnnnnnnnnnnnnnnnnnnnnnnnnnnnnnnnnnnnnnnnnnnnnnnnnnnnnnnnnnnnnnnnnnnnnnnnnnnnnnnnnnnnnnnnnnnnnnnnnnnnnnnnnnnnnnnnnnnnnnnnnnnnnnnnnnnnnnnnnnnnnnnnnnnnnnnnnnnnnnnnnnnnnnnnnnnnnnnnnnnnnnnnnnnnnnnnnnnnnnnnnnnnnnnnnnnnnnnnnnnnnnnnnnnnnnnnnnnnnnnnnnnnnnnnnnnnnnnnnnnnnnnnnnnnnnnnnnnnnnnnnnnnnnnnnnnnnnnnnnnnnnnnnnnnnnnnnnnnnnnnnnnnnnnnnnnnnnnnnnnnnnnnnnnnnnnnnnnnnnnnnnnnnnnnnnnnnnnnnnnnnnnnnnnnnnnnnnnnnnnnnnnnnnnnnnnnnnnnnnnctagctgtacgtataaataatctggagggatattatttgagtaattattttttattttgtattatttgagtaaaaaaattgattgaatgatttcttatttattgatggtacacaaatctttatttatctgcaaaagaatctttatttacataaatatatttgttaacgttttacaagaattttttttcctcaatttgtatttataaaaaataaaaaatgtcacttttttcttttttaaaagaataataaacataattaatgtataactataatttacaagtggggaccacaatttttttttggatttggatgcattaactttacacaggaggaaaagtcagtatcactttcatcaatcttataatccaaattttacaacttgttttaaaagatattttttaattttttttttttactttagttattaatttatcactttttactttaaacccataaaaaatactactaagtgtgtagattaattgttaccaggtatttcagtatagcacatggttttgaggaaaaaatttattgcctataaactataagggtctatctacttcaagcatgattacatttgattatatttgatgaaacataccaatggtctagataaaaagaaaatgtcagaaattttgtagcagtactgctagaaatttctttaaccgtcttatatttgtcaaacattttctctgacaattttctaaatgatataaaagactattaattaaactgaaataatcttgtattaattaataattattctatatctttaataatgtttttatggttttaaaatatacaagatataaaaattaaattaataatcaaattagaaatatctttcaaaacaaagtgttaaaattcgaactatcaaattaatctattattttaaaatgagattaagtaattgtaaaattcccaataaatctaatccatgctttctaaggccacgctaggtagtaggtacgtcatttcacattaataatttttctgctatttcattgcactactagctatgatcgaggatccatcatcttctgctattccataatcacccaatagctcaaatatgatgttctctaagctttcattaattcgtctaattctctattcactcttaagcctccattcctcccaacttttcacgtttacttcttttgcctttgctgccatcactgctgaaaaccatgagagggaagcagctgctctacttgagtggagagtgagtcttgacaaccaaagccaagcttctttgtcatcatggtccagtgctgtaagtccttgcacgtggaaaggaatcgtttgtgacgaatccaactatgtgaccgctataaatgtggcaaatcttgggataaaaggtactcttcacagtctcaaattttcatcttttcccaagctgctaactctggatatttgtaacaacagttttaatggaatcattcctcagcaaatttctaacttgtctagagtttctcagttgaaaatggatgctaatctttttagtggttcgacccccatttccatgatgaagttggctagcttgtctttgcgagacttaacaggcaataaactttctggtaccattccatcaattagaaacttgacaaatttataacacttaagctcgcaaacaatagtctctctggtcccatcccaccctacataggagagttggtgaatttgaaagttggtgattttgagagtaatagaatttcaggatcaattccttcaaatattggaaacttgacaaagctcgacatggtattcttagccgataacatgatctctggatccgttcccacctccattggaaacttgatcaatctagagtcgctggacctttctaggaacactatttccggtctgcccttggaaatttgacaaagctcaattttttcctagtgtttaataacaaacttcatggtacattaccaccagcgttgaataactttaccaaacttcaaagcttacaactatctacaaatcgtttcaccggtcctttgccacaacaaatttgcatagattggttactgagaaaatttgctgctaatggtaattctttcaccggtccagttccaaaaagcctgaaaaattgcccagtcttaccagagtaaacctatcaggaaattgcttgagcggaaatgtctcagattgcttttagtgtgtatccagagttatttttaaaatcatttctaaaaatagaaaataagaagaaaaaaatgaaatgaaattttacataagtaaaaataagatctgtattagctaatttttagaagctcatcaatgtaacttctctaaaagatgagatgacatttacatatgaactaataaaaaactcattttagcttatgaagaaactcatttcattttttcttcttactttctttttctaaaagtatttctagataaacttacattcaaacaggtccttcgttgagctgagtagcaatagtttttatggccacatttcaccaaactgggcaaagtgtcctagtctcacaagcttaggatatccaacaacaatttacctggtggtataccaccagaactagaccgagcacccatgttaaaggaacttgtcttgtcttcaaatcatcaaacacgaaatattccaaaagaacttgggaacttgacctctttttggcaacattcttaccgaaataggtgctttgtaccgccttgaaaatttggagcctgcagcaaataatttaggtggcccaattccaaaacaggtgggatctttactcaaataggttcacttgaacttgagcaacaacaaattcacagagagcattccttcgtttaaccaattgcaatctcttcaagatcttgaccttagtaggaatttgttaaatggaaaataccagcagaacttgcaactttgcaaagattgaaaacactaaacctctcacacaacaatctctctggagccattcctgattttaagaatagcttgcaaaatgttgacatatctaacaaccaattggagggttcaattcctagcattccagcctttcttaatgcttcatttgatgcattgaaaagtaataaaggcttgtgtggaaatgcctccggtttggtgccttgccacaccctacctcatggtaaaatgaaaagaaatgtcatcatgttggcattactccttgctttcggtgctttatttcatcaaagagcaacaaaggccaaaaaggaggaggctaaagaagaacaaaccaaggattatttttccatttggagttatgatggaaaattagtgtatgaaagtatcattgaagccacagaggggtttgatgacaaatatctcattggagaagatgggtctgcatctgtttataaggcaaaattaccctcgggagagattgttgctgtgaaaaaactacatgctgtacccaacgaggaaacactcaacataagagcttttacaagtgaggttcaagcctcggcagaaatcaagcatcgtaacattgtgaagttaattggatattgtttacatcctggcttctcctttttggtttatgagttcctagagggaggtagcttggataaagtactaaacaatgataactgtttgattgggaaaggagggtgaaggttgttaaaggtgtggcaaatgctttgtaccatatgcatcatggctgctttcctcctactgttcatcgtgacatatcaagcaagaatgttcttatagatttggattatgaagcccgagtctctgattttggagcagctaaaattctgaagcccgattgacaaaatttaacctcgtttgcaggcacctatgggtatgctgcaccaggttaggtcctttttgttattaagaaatcaacgctatacttgtttcaataataagtgctgctgccacttgttgtatgatactattttcatacttaatttgatatattacagagcttgcttatactatggaagtgaacgagaaatgtgatgtcttcagtttcggagttctttgtttggaaaggatgatgaggaagcatccaggagatctcatttcttcatttttttcatccactggaacgtcatcagcttctaatttgctgttaaaggatgtgctggaccaacatgtgtataacgagtttgtgatgccaacatcatcttcagtgaatttattctccatggtcacacttggccaactcgtagataattgaaccttcttgtttcctgcctgttgtaagcttttttattgctttaactagtgaagaatctcagcacggtttaccacagactgaatgtagatcagtaatgatcaaaacagaataacatgtctcacattctctttattcctcaactcactgtgttgttgttatacataatgtttcttgatttctatatgctgtaatcgtgttagaatcatataaattgcattagatttacattggctatactctctatatctcaattacacaattacataatctaattgtgtctataagttttcaagaaaataattttgggactgattttgagaaattcagttctccctttctttggattttttaccatttgtctaatacatatattcaaattcatatattcttcaaaatatccatatacgagttttcttgcagatatatttagccatagtcctaaaaaatatttacttgaagagttttccgtttgtaaaagagttcaaccttgttattttattccgttagttctgtaactatcgtaatcgattattgcttcaattaatcaattaaactatccaacaaaacatctaggttaacattcagatcaatgtaatcaattattactgaacgagtatttagaaactagtatccaagcaaagcaaccaattatgttaaatggtagttgactattgcctaatctactgctttatacaaaaactagttactgtggtatcacaggtcctcacacacactgatgcactcacacaaatacacaacaatttctctagtagaatacttctgatgtatttagataatggtttgccaagccacacattggccttttacatgagatgttatttataagtaatagtaactcttcacctagggacatgattcttcacataagtaacttcttcacctagggacacgactctttacatgagtaacttcttcacctagggatatgactcttcacatatctaatttattattattaaagtttaatccaacaaaatctccccataaactttaaatatttcttccgtctttcatccccaacatcttcttacaattttccagcagcaatgtcggtaatggcttcgtgaaaacatctctgacttttgaaatggactcctagcatgcttgcttagcacacattcttcacaacatctcttttaacagctcaaactcggcaacccatccaccattttcttgttcatcaactcggccaggcctccgtagtgaagatgcccaaaccggcgatgcacactcctcaacattagtttgaacattctatttttttccaaacagccgacctgcacactcctcaacattagtttgaacattttatttttttccatctgaactcgaactatcaaacgtccttgtttatctttcaagaggagaactcggtctatcatgagaatcgagtagccattctccatcagttgtcccacactaagaatattattttttagatcaggcacgtaatagacatctcggatgcgcccaattcgtccatctttatgcaagaaacaaatcgtacctcggcctttgacatcaacctttgaagcatctccaaatgaaacatgttcggcttctatttgtctcagattactgaacaaatgcttatacccacacatatgattgcttgcaccagtgtctagataccattccatctcggatccctggttgacttcacttctagtcatcatcagaattcctccatctcttacttctccttctgtaacaaggtttgaagtttcatttcttctttcatctcggcaatccttcgcaaaatgtccgactcaaccacagttgtaacatctgtccgagttgcaatctctcgagtaatgtccatactttccgcatttaaaacattgaacattcgattgatttgaatgtcagcttcttccatgacctcggcctcgccaattctgccgacttgattcagcctgctccttattccttccttcttgacctcagcctctaccacctcagtcatgtccacgtccacctaggccacgacctctatctcaaaaattgtgagaatagagcgctttctcgtctttgattgaagcttttgtcttaagtgcttgctccagtgactcttctttcttctttttctttccttgttcatgtgcctccaaggaaccaacaagttcgtcaacggtaagcgttgctaggtcctctgactcctcgatcgcacatacaacattctcgaagtcgtcaatgagagacctcagaattttctccaccactctggcattggacaacacctctccatttttgtttagttgatttaccatggtctggacctgggtgatgaaaccagataccccttctccttccttcattttcattccttccaactctccaaggagaatttgaagtcgaacctgtctaactcgatcgactctcttgtagacatttgcaagaatgtcccacgcttcctttgaagttgttgcaccagcgatcttctcaaacacggaattatcaacagcccggaataacatgtacaacgcccctttgtctttcaacctcgtctctttcaatgtcttgttctgcgtcgctgtatatcctgttgtggatgttggttccttgaaaccaccatggacaacctctaaactatcatgggctcccaaaagagctttcatctggatactccagttttcgtaattagcctttgtaaggcggggtagtggcagactactacttggcccactctctattttctcatgctctgataccaatttgtggtatcacaagttctcacacatactggtgcactcacacaaacacacaacaatttttctggtagaatacttctgatgtatttagataatggtctgccaatccacatattgaccttttatatgatatgctatttataagtaataataactcttcacctaggaacataactcttcacatgaataacttctttatctaaaaatatgactcttcatatatctaatttattattattaaaatttaatccgacagttagataggtatgtaacataatagttttgctggtacaagaagtttatatgaaatcagaaccgtgagaagtatttcattcatacagcagcaaaatgttatgtttctgatccatatactgacagaatagcacagcagatttctactacctaacaggttaatgagccacctgtccaacataaatacaaagcttaagacactccaaaaggtataggtggttgtactttagtctgaagatacattaattactgcataaaatattaacagttttcaaccatcaaattaacaagattctttgatttaatgattcatacataaaaaaaacttatttaatgctagataccatgcagaaagtgggactaatatgccatgtagttagtactttgtttctagagagaggaatgaactagccaaattctaaaatgttagataccctgtctacaaattttgtggcagtttcaccaaaaatacatcatgcatatatattgcggtccgcactatacaatttgtacatttaaatttcacgtgaaactttggccccttcgacgctggttgtttctcgattcagggaaattacgagatatatatatatatatatatatatatatataaattaacttaataattatacatttttattttaatctcatattttgaataaggttttatcacattaaaaattttagaataataaattgattatatttattaatcaatattatgtttattttaattttaatttatatttatttttctatttatttaagtgtttattataatattatacttataataattaaaaaatggaaaaaattaaaattaaaatatattttgattaaataatcattttcgtctctaaatgtataaaatgttgataaatttatcgttgaatgttacataaactctttcattaataataacatgtgaaattaacaaataaataaatttgtcacatttatttttactttcgaaactaaaatttaaatttttatatttcataaacaaatttatcatgttctacacattaaaaacaaaaataattatctaccctaataataataatgataaaactatcaagtttgagacacagggaagaaaatcaccaatactgtctttgtctcgtttccaaacacacttttccttactttattccgagtttcctttatgcgttatgcctggcaactttgtttatagtgataatgcactttcttaaagtgaagaaagattatttattttaaattaatcattagcatttcaacatatcatttatattataaaataagtctaatttttttataatttaatttttttttctttttcatttttgtaaaaaatgatttaatccttataaaatgtattttttttctttaaaatgctttaaataacatttattttattgttcaaaacatttattttaatgttcagattacaatctaaaacattttaaagataaaaaaaaaaataaatatattttatgtacagtccaaaatagtaaaatgatacgtggtcacctcatataaatgtcaatgtacacgtgatcaccctccatgtcagcattgcctcattaataggtgcttattcagcctctaggtgccagcccggacacagtgtctgggttccttgtcaacaccgctataggagcgcggacattagcaatattctctctccttgttaaatgtctatctacatgtaaggatattcaaataggtgtaaccaccttatcttatcatatctcaacaagttatctactaattgttacttatctacaagtaacaatatatcaataaggtacacattatctcttattcaaattaagataactgcatgttattatatgttattattatcttatcaacagattatctataagcaatgttctaaggcccactccatgctataaatataaccctccaggttctctctactcactcgattcacactccatactcattcagtattcatacaaaatacctctctctcatatacacttgaatgcattactcaagtctcttattctctatattttaggccgagtccatatacttggtcatccttattaatttaatgtacttacttgagcatcggagtgttttttctttgttttgcaggtccctcctctgagcaaagtctacccacactctggcgccacagaatttggagtccaccaaggccacatcaagccaacatgtgaaattttcagattttgacaagaacattttataaggactaaaaaaataccaagaaaaatgaaaaaaaaaaaactaaactataaataccaaacaagtatgttcttataagcatatgctactttaagaatacttaccaagaacctgttccaataagcatttcttaggatgtgcttaatagaagaagaaaaaaatatataagtgagcgaggtgtttgataaaataagtgagaaatacgataaaaataaaagtatttgattttagagaaataaaaaaataactattcatttattttatttatattctttttttggttactaatcattatattaaatctgaaatcttatttagaaaatcaaatttaatattatttaaatcaatgttatgttgattttttcctttttatttctttgaacaagttactttttttttttcttctaactatttatttctcttcctttttaagtttcaccacatcagcacctcggatggacttggaggtgctttaatagatggctgttgccctgttccgctttttacggagcctaatcttttcccaccaaaaaaaaaaaaaacaaaaaagtcttattccccaacgtacatgaacaaagtggctaaaacatgcagcattttcgttatccgagtgaatatggaagagaaactttagagcatattaaattattttttatttttaagattttgtaaaataaattatttatataaaataattagatttaaatttaaaaaatctacaatattaattggattttctctaactacacaaaataagaaattattttttatcttaaaaaattcatcaaacatcttatattgaaaatcaacttagcaaatttcctcttttttgaacggtgatgtggccatagtcaattagtcattgacttatgattatctttggaataactttatcttttctctcctaaaaaacagagacaatacataaattggctgtgaatgtgattggagatggagaaggctcgtaggaagagaggtcaagcattcatatattctctgttgttatggtaggtagcagtggtggtggtcactaaaaagaaaaaaatatagtgtgtttagcaaaagaaaatgaatttgagataaaatttatttatttttttaactcaaaataaaattataattaagcaaagtatatgatgtatacatattttaattttgatctaccagatatgtatatggttaatcaatagaattcgacgtggacatgagtatcgtgtgtttgaattaattttatggtgagaattatttaatttttttttagtaaaagtaaagtaaaaataccctctaaattccaaagtaatactttttttagtcnnnnnnnnnnnnnnnnnnnnnnnnnnnnnnnnnnnnnnnnnnnnnnnnnnnnnnnnnnnnnnnnnnnnnnnnnnnnnnnnnnnnnnnnnnnnnnnnnnnnnnnnnnnnnnnnnnnnnnnnnnnnnnnnnnnnnnnnnnnnnnnnnnnnnnnnnnnnnnnnnnnnnnnnnnnnnnnnnnnnnnnnnnnnnnnnnnnnnnnnnnnnnnnnnnnnnnnnnnnnnnnnnnnnnnnnnnnnnnnnnnnnnnnnnnnnnnnnnnnnnnnnnnnnnnnnnnnnnnnnnnnnnnnnnnnnnnnnnnnnnnnnnnnnnnnnnnnnnnnnnnnnnnnnnnnnnnnnnnnnnnnnnnnnnnnnnnnnnnnnnnnnnnnnnnnnnnnnnnnnnnnnnnnnnnnnnnnnnnnnnnnnnnnnnnnnnnnnnnnnnnnnnnnnnnnnnnnnnnnnnnnnnnnnnnnnnnnnnnnnnnnnnnnnnnnnnnnnnnnnnnnnnnnnnnnnnnnnnnnnnnnnnnnnnnnnnnnnnnnnnnnnnnnnnnnnnnnnnnnnnnnnnnnnnnnnnnnnnnnnnnnnnnnnnnnnnnnnnnnnnnnnnnnnnnnnnnnnnnnnnnnnnnnnnnnnnnnnnnnnnnnnnnnnnnnnnnnnnnnnnnnnnnnnnnnnnnnnnnnnnnnnnnnnnnnnnnnnnnnnnnnnnnnnnnnnnnnnnnnnnnnnnnnnnnnnnnnnnnnnnnnnnnnnnnnnnnnnnnnnnnnnnnnnnnnnnnnnnnnnnnnnnnnnnnnnnnnnnnnnnnnnnnnnnnnnnnnnnnnnnnnnnnnnnnnnnnnnnnnnnnnnnnnnnnnnnnnnnnnnnnnnnnnnnnnnnnnnnnnnnnnnnnnnnnnnnnnnnnnnnnnnnnnnnnnnnnnnnnnnnnnnnnnnnnnnnnnnnnnnnnnnnnnnnnnnnnnnnnnnnnnnnnnnnnnnnnnnnnnnnnnnnnnnnnnnnnnnnnnnnnnnnnnnnnnnnnnnnnnnnnnnnnnnnnnnnnnnnnnnnnnnnnnnnnnnnnnnnnnnnnnnnnnnnnnnnnnnnnnnnnnnnnnnnnnnnttttttttttttaccttttttattaaaaagtattgatttgaaatattttttgaaaagaaggcactttatgcaacgtgtgcgctaaaattaagtgggctggaatgtttcacgtgatcgagcactacttttttctcgtaaattattaagtgttatataatttaacaaaactgctttaaatataaaattcatgcactgtttttaattacataaacaggttagtgactaatatcttaaccattaaattatcaaataaataaacgatcaaaaaaaattatcaaatcaataaatctattatgtaacttacccattgctgagaaagttattcacttccccacgttagatactcctcctctttctattgttacaaactaatgccaatgcattgtttggcttatacagaaagacagtatttatatttggtagaaagatagtatttacatagaaattgaaaataacgtaaaaaatgataggaatagccctaatccgaataatttatgctgtcgacctgcgtcttctacagggccacaatatgttggcaggatcttttatcaaaattgtcggtggttctgttgcaatttgcaataagtaatgattaataaaattgatgatgtcactggtgtctatgtaatgaaaataggtgaaagttacgtaagatacagagctagacttaccctctgttttggaagaggaaaaaatgaaagaaaaaaaattcaaaatttaaattggaggaaaaattaaaaatagaaaacttgtaatttttttcttctaaaagtgggttactctctttgattttttatattttttctcaaatcaaataagagaaatacatgctttttttcttcttttatttgtgtttcttccaagtggacccttaagctttgtttgagagttaagaagggaagggaaggaaaaagattcaaggggaaaggaggataaggaaaatgagaaaaatgagggaagtttcttgttccttatttaggagttaaaaatatattaagagaaggaaatagagagttaataagatgttaaatgtgaaaattatataatttaaatgtaaaagtatattaaaaatatattttaatatatttttgaatttatagctgggtagaatagtaattttaattacttttccttctaaaaatcccaaattgggggaacaacaatttttagactttggaaaatttcagaggagtcttaaaaatcctcaaatcattttcttcaaaaattaaaacttccaaacaaggagatgtcaccacctaaatattttccttcctttttttttcctctaaaatctctctcccaaacaaagccttattgagtgaaagactttttttttttcttgtgaatgacatatggtgattggtggaagagggcgtaggcaaatttcgaaagccaatagtaaagcattatgcgcaaagaccttcataaaattccataatatatatacattctttgcgtcttatttttatatttttattacatcacattatttactatattttcaactttatttggtaggatgatatatttatcaataagtaactatatgtacctttcgtaaatcattcattttaattttcatattaaaatcatgcttctagaaaatggtgaaagcggagttatattagggagcaatgataacggcatactcttttttcttttcgatgcgtgtatgaataaaaatagtaatcactatttacatcactttgaatcaaagttaattagaacaaataataaataaatttaataataaataaataaataaatgaaagatgaaaggaatgataaataattataaaaagatcatctataatataaagataataacatatttaattcttcattagacatattttttctttatttcatcttaagacatataatccatgaatttatatcacatgtcttatttaactaatttttttcaaataaatttcaatatatttttatctctctttgtgttaaactcttgatcacaaactttattattgttaaatattcaaaaaatgtctcattacaagcacaaaacacaactcaaaataagagagaaaaaatagaagaagaaagagaatgatagatatactaaataatatataatagctaatgaacaatgaagagagaaagaaaagaatagaataaaattaagatggaatatatataagcagtgccacagccatggattacatccacaccaaaacaacaactgaagatatattatggcattctgcatcttcaaacatgttctgtcattattccttctctgcattttcttgcaggaacctaccaatgcccttagaaaggctagtaagcttttgccttttagttcccccgttacggttttcaataaagaatctgatggagttttgccatcatctcttcaagttccaactttgagaatttccaaatttatattttgttaattagtgtaccataaaacatttcaccaattgtgtgctttgaattctgtgttttcagacctacattgtgtacatgggaggacattctcatggtccagaccctttgccaagtgatcttgaaacagccacaaactcccatcatgatttactcgcttcttacttaggaaggtaaaacaaatgttaaattctcttaaatattattaggacgtgcgtgttaattaaaatttgataatttaacagtcatgagaaggccaaggaagcaatgatgtactcgtacaataagcacatcaatggctttgctgccctacttgaagaggaagaagcatcacagattgcaagtgagcaaagactattaccatatattgccatgattttcttgtcatcttgaaaccacacaaattgatataataatatattacatgtttttattggtacagaaaatccaaatgtagtttctattttcttgagcaaagagcacaaattgttaactaccaggtcatgggattttcttggactggaaaaaaatgaaaaaattcctgcaaactccgcttggaggaaagcaagatttggagaaaatataatcatcgctaatattgattcaggtatgcttagttaatgcagtttacattttttttttcttcatgaatttgtactgcaaacatattttccttttgtaaatacgttagttgcttcttgaacaggggtttggcccgaacaccccagtttccgcgacaaaggatacggacctgtcccttcaaagtggcgtgggaagggtgtctgtgagatcgacagttttaatggtacaaagagttatctatgtaacaggtaatttttctgttatttcatttcaaaattgttgggttgagcgtgaaataatatatgtattttaaaacggtgtgatgatcacggccatggaaggtagttattattttatttacagcttaattaatgttttatctgtataattttggctcttattttctctctcttgcaattttaattcatttattgtaaataagttcacaattttactctaatctttagttttatacacttttttttgttttaattaattatattagtttttagttgttaaatgtttaattttcaatcctcaatgttagttaaaatgtaaaaaaaagtatgcaaaattaggattaaattaaaattgtgaattttataaaataagaaattaaaattgagatcaaaatattagattatgattcataggctatcaaaattgtaatttagttattctattatattatgtattttgtgtttattaaggatgtgtttgaaacgaaagaaaaactaccaaagtatactagaatactagatggatagaaatataggtgtacttagtatattatatatgtattttttttaaaaaaaatagattatagatgaatcaaaattataatttaattattctattacttatttttgtgtttattaaggatgtgtttgaagtaaaggaaagagtgtgaaagtatcctagatggatagaaactatagttttagtcaaataagaacactactttttattattaaaataagtataaaaagtgcaataaagatgacaagttaatatacaaagctcttacacaatgactattgtggtttcatatgaaaaagtctattttttataataaaaaaatatatgctctgccctccaaatccatatttcaaatccaaattcagacagggacaataataccccaatcatttttccaagagtcacaagaccaaaataaataaatgagtatcataatagcaagcaagcaattttggagtcttcaactcttctaatacacatccacacagagtttaagtacgtattttggattttttttttttcataacattatatgttttataaaaatttctctgatatttttttaagaaaaaatattttaaactatttattgcttacgtcaagaaaaattcttgaattcgtcgctgctaattgctatcacatgtagccataatattaatattaatataattatgatgaatattcaggaagttgatcggagcaagaatttttctaaaaaatcgggaggccgaagacaagaagattgaccgacggctacgcagcggacgtgacttcgtagggcatggtacacacacactgtcaactgctggtggtaattttgttcgcggtgcaaatgttgaaggtaacggcaatggtactgctaagggaggctccccaaatgctcgtgttgtagcctacaaagcatgctggaataaactcgacccaggagggtgccatgaagcagacattctacaagcatttgattatgccatttatgatggtgttgatgtcatctctgcctccgtgggtgcgtctaatccctataaggaagctttgttaacagatgggatttccataggagcattccatgcagttgccagaaacattgtcgttgtttgctctgctggaaatgatggaccatcgcctttaagtgtcgcaaatgttgcaccctggtccttcaccgttgctgctagcacaatcgacagagaatttatcagcaaaatttctctcaacaacaatcaatccattacggtaagatatatcatctaattatctagacattaatttatttcatgtcggttaaaatatgtttctttttcatataaatataaaaatatttgaaattcatttttacaaaattttctattttctatatgttttttattcttataaaatttgaaatgtattgatttttatctaaacaaaggttttcataaatctaaactatgactttttacattagtcatatatataattaatataaatgtaatatttttttatgtatataattaatgtataatgtgacatatttttttaattatttgtgtacttaatgaatgtaaaaaagtcattcacataaatatggatgtctgaatctttctttataccaaaaactaacacattttaatcttatgagaggagaaaaatttaataaacataaattttaaacatttttatatttgaaaaaaaaaaaacatattttaacctttttttttattttcttaacgtctacataattggaccttacgtacatgtatcatatcagggtgccagtctcaatcgaggcttaccatcttcatcgccatcgaaaaagttctatcaagtgattaattctgtcgacgctagacttcctactgtgtccattgatgatgcgtaagcaccattctttttttnnnnnnnnnnnnnnnnnnnnnnnnnnnnnnnnnnnnnnnnnnnnnnnnnnnnnnnnnnnnnnnnnnnnnnnnnnnnnnnnnnnnnnnnnnnnnnnnnnnnnnnnnnnnnnnnnnnnnnnnnnnnnnnnnnnnnnnnnnnnnnnnnnnnnnnnnnnnnnnnnnnnnnnnnnnnnnnnnnnnnnnnnnnnnnnnnnnnnnnnnnnnnnnnnnnnnnnnnnnnnnnnnnnnnnnnnnnnnnnnnnnnnnnnnnnnnnnnnnnnnnnnnnnnnnnnnnnnnnnnnnnnnnnnnnnnnnnnnnnnnnnnnnnnnnnnnnnnnnnnnnnnnnnnnnnnnnnnnnnnnnnnnnnnnnnnnnnnnnnnnnnnnnnnnnnnnnnnnnnnnnnnnnnnnnnnnnnnnnnnnnnnnnnnnnnnnnnnnnnnnnnnnnnnnnnnnnnnnnnnnnnnnnnnnnnnnnnnnnnnnnnnnnnnnnnnnnnnnnnnnnnnnnnnnnnnnnnnnnnnnnnnnnnnnnnnnnnnnnnnnnnnnnnnnnnnnnnnnnnnnnnnnnnnnnnnnnnnnnnnnnnnnnnnnnnnnnnnnnnnnnnnnnnnnnnnnnnnnnnnnnnnnnnnnnnnnnnnnnnnnnnnnnnnnnnnnnnnnnnnnnnnnnnnnnnnnnnnnnnnnnnnnnnnnnnnnnnnnnnnnnnnnnnnnnnnnnnnnnnnnnnnnnnnnnnnnnnnnnnnnnnnnnnnnnnnnnnnnnnnnnnnnnnnnnnnnnnnnnnnnnnnnnnnnnnnnnnnnnnnnnnnnnnnnnnnnnnnnnnnnnnnnnnnnnnnnnnnnnnnnnnnnnnnnnnnnnnnnnnnnnnnnnnnnnnnnnnnnnnnnnnnnnnnnnnnnnnnnnnnnnnnnnnnnnnnnnnnnnnnnnnnnnnnnnnnnnnnnnnnnnnnnnnnnnnnnnnnnnnnnnnnnnnnnnnnnnnnnnnnnnnnnnnnnnnnnnnnnnnnnnnnnnnnnnnnnnnnnnnnnnnnnnnnnnnnnnnnnnnnnnnnnnnnnnnnnnnnnnnnnnnnnnnnnnnnnnnnnnnnnnnnnnnnnnnnnnnnnnnnnnnnnnnnnnnnnnnnnnnnnnnnttttttatttcccaagcttgctttcaaatattcgtctcatacgtgtgtgtatatatatgtattggttgatgtagtcgtctttgcaaaccgggaacacttgatcctaccaaagtaaagggaaaaatactagtctgccttcgaggcaataagttaacttcagctagcgaggtccaacagggtcatcttgctggtgctgtgtcagtttttgtgctaaatgatgagggaagtggaaatttacttctggccgaggatcatattttaccagctgcaagtataggtggaaaggaaagtcctaatattaaaaacggtacaggcaaccatggcaataacaagtaaaattcatatatcattaaatcccttttaaacgtggtattctatatatatagtatatttgtagcaagtgaagcacttgaatattaatttatatatatgttgttgcagggagattttagcttacttgagtgctgcagaaacacatataggagtaaagccagctccaatcatagctggattctcatccaggggtcccagttccgtgcaaccattgatactaaaggtctataatatatacatttggttaacaacaccaacatgacatgatgattaacttttaattcttacaattaatgattcattagagattaatttgtggctaaccgtaacttgtttcttttttcagcccgacataacagctcctggtgtgagcataattgctgctttttcacaagccgcgggtccgactaatcttgcaacagatagacgtcgggttcttttcaccgtgcaacagggaacttctatgtcttgtcctcatgttgctggcattgcgggtcttctcaaaacatatcatcccaattggagtccagcagctatcaaatctgctattatgactactggtgcgttcattaccaaagtaatatcaatataaaatcttcatccacagcaaatcattggcggcttattaacaccgtactatgctttttattaattccagctacaacactagataatacgaatcaaccgattcagaatgcatttgataagaaagcaactcccttcgaatacggcgccggacacattcagcctaaccctgcaattcaccctggacttgtttatgatttaagcacaaccgattacttgaacttcctatgtgcttctggttacaacgaagctttactcaagttttttggcaatgtgaaatcccattacagttgtcccaagtcttacagaattgaagatttcaactatccttcaattacggtgcatcatcctggctcaaagactattaatgttactcgtacagttacaaatgttgggcctccaagcacgtatgttgtgaatactcactggccgaaggggattaaggttcttgtgcaaccaagttcgttgacttttaagaaaactggagaaaaaaagaagtttcaggttattcttcaggccattggtgtgcctggtcacaacattcctttatttgggaatttgtcttggacagatggcaagcacagagtaactagtcctatcgtagtgctggactcttagaaattaatctcagcattgttatgttatcattgtcattttactttgtttgcttttgttgttttttaggctgtaatataagcgtgctttctgctcatgttgcattcaagtgctttgtccaaaaaaaaataaaaggacaatattattgtgcgtgcatgtaatttggcatatttaaaggattggtttgatagtagagaaacgagaggaaagaaaatataaataattaaatatatatctttttaatgtagagagaaaatgaaaagaaaagttatttttaatataaaatttagtttttcatctctcatttttttttctaattcaaattttaaattttttttccctttcatccgattaaatataacatgagattattgtttctttttcctttttatgaatttggaagtctatgtatgaaaggaaaaattttctgtaaattacacatacttctcttaaacatttcctttatctgccactgatttccatcacatgaaattgaagcactgtccaaaaatgaccatttccttcttaaaccatttatttgatctggagttcacttaactataaacaaaaaaattagaagaaaaatttcaaaaacaaattaagataggcaatgaaaaacatgaataattttttttccacacacatctgcttcccaatccgctcacaatggcaagtttaatacctatataaaattcttcaaaaatggaaatttgttctgtgaaactacaacaacaaacaaaactaacgtcacagtagtttctcagtgtattagattcttctatatatctcgcactccacagataaaccaataagaatacaaccaaatagcaacaacaagccaataacggaactattgaagaacaataaaatttgaaaaacttcaagaacccattgaagaattaaaagaaaccctgtataaaacttcaagaacacggttttgaaggagtgagaaccagatctggattcccgggttgcggcgtccgaaactctgacggcggcgcagcggtgaccgctcctccttcaatcacgctatcgtcctctgctgcggcaactgaaagtcgggacagatcttgattctgcatgctgtttaaaagatggggctgaaagtatcgttaaaaaacataaggatgtcgcataataagtccaaactttgggaaagtttttgtaatttatgcttgttttaaacagaaactaaacgttagacagatagcctatgttccttttgagatggccttagggaggtaaacattgaacatcttagaatcaaaatctcaaattgttcctgttttaaaatggccgaatactttctcttctcttgctgaccaaaaaaaaaaaaaaactttgtcttctcttgtttcattctttttggggtgtcctttcttattatatgacaaaactatccttggaagggtgaaatatatgtaaaaagtacttcgatgtttaagttagatttctgacacagaaaataatgaatgtagtaaatgagcaaataaaataatgtgttattttaaaaattttaatcctttatatacatgtatttatgagcttgcctcttaattgaggggacataatatgaaattatttgataatgttaatatagattatatattattaagataagttaaatttctttatattaatggagtggttgtccagaggatactaaaccatcttaaagagattccaaattgtgacggagagaatactaagtcaggccgaaaacgtgcataagccatggcgaaaaagacacgttagagtatcacaattcataagaaaaaaatattatatttactcttaaatgttcatatatatttatttgtaaaaaatttaagatagattaaaaaatatatatttacaatatgtcaatctaacttaaaatctattaagaattaagatattattttattaaaatttaattaaaatacaccgtcattcatgtatatagatagatattattctatatgataattttttataacaattaatttaaaaattatatatagaatgatattttattgattaatacgatataaaaaaattatatttacggggtatgaaaattatgctcttaaaaataaatatatattttgacttaaatatattttctatttatgtaatatacttttaaacattattcattttgtaaccataaaaaatgctaatatcatactatttaaaatatttttttattaataaaaatttattagaaatcataaaattttgaagcttacgttatatataggaaggaacgtggtagctttgaacgtccaacatattgtacgttaccataatcacccaatagctcaaacatggttttcaccaagccttcattaatttgtttaattctcggttcactcctaagcctcctttcctcccaagttttcacgttttcatcttttggctttgctgccatcactgcttatgaagggacggaagcaagtgctctagttgagtggaaagctagccttgacaaccaaagccaagcttctctgtcttcatggacaagtggcgttgtcagtccttgcaggtggaaaggaatcgtttgtaaccaatccaacgctgtgactgccgtaaatgttacaaatttggggctaaaaggtactcttcacactctcaacttctcttcctttcccaagctgctaactctggatattagtcacaacagttttagtggctcaatccccatttccatgatgaagttggctagcttgtcaattctaaacttggaatacaatagcctttcgggctctattcctgaggagattgcagaattgcagaacttgaagcgtctaatacttcaagggaatcaactttctggtaccattcctccaacaattggaaggttgtccaaccttgttagacttgaattgtccaaaaactctgtctcgggtacaatccccacttcagttacaaacttgacaaatttagaaaaacttcagctctcagtcaatagtctttctggctccattccatcctccataggagacttggtcaatttgactgtttttgaaatcgattataatagaatttcaggttcaattccttccaatattggaaacttaacaaagctggtcagtatggtcattgccattaacatgatttctggatcaattcctacgtccatcggaaacttggtcaatctaaaggatttcgtcctttatgagaacaatatctccggaattattccttccaccattggaaatatgacaaacctcgacgttttcagtgtctttggtaacaaacttgaaggcagattaccaccagcattgaataacattaccaatttgaagttatttcgtccagcagacaatagtttcactggccccttgccacaacaaatttgccttggtgggctacttcaagaatttactgctgaaagtaatcatttcacgggtccagttccaaaaagcctgaaaaattgctccagtcttactagactcagactagatggaaaccagatgaccggagatatatccgatgcttttggtgtatatccaaagttggactacgttgatctgagtagcaataattttcatggccacatttcaccaaactgggcaaagtgtcctaatctcacaagccttatgatgtgcaacaacaatttatctggtggtatacccctagaacttggccaggcgcccaagttagagagacttgttttgtcttcaaatcatctaacaggaaaaattccaaaagaacttgggaagttgacctctttgctttatctatcaataggcgacaatgaacttttgggtaacattcctacagaaataggtgctttgtccggccttgaaaaattggagcttgcagcaaataatttaggtggcccaattccaaaacaggtgggatctttacttaaattaattcacttgaacttgagcaaaaacaaattcacagaaagcattccttgggaatttaacgaattgcaatctcttcaagatcttgatcttagttggaatttgctaaatggagaaataccagcaacacttgcgagtatgcaaagattggaaaagctaaacctctcgcacaacaatctctctggagccattccttattttaagaatagcttggcaaatgttgacatatctaacaaccaattggagggttcaattcctaacattccagcctttcttaatgcttcatttgatgcattgaaaaataataaaggcttgtgtggaaatgcctccggtttggtgccttgccacaccctacctcatggtaaaatgaaaagaaatgtcatcatgttggcattactcctttctttcggcgctctatttctgttattattggtggttggaatttcgttatgtatttgctaccgaagagcaacaaaggccaaaaaggaggaggataaagaagaaaaaagtgaggatcattattccctttggagttatgatggaaaaatggtgtacgaagatatcatggaagccacagaggggtttgatgacaaatatctcattggagaagggggtactgcatctgtctataaggcaagattaccctcgggacagattgttgctgtgaaaaaacttcatgctgcacccaaccaggaaacacccgattcgaaagctttttcagctgaggttaaagccttggccgaaatcaagcaccgtaacattgtgaagtcacttggatattgtttacatccacgcttctcctttttggtttatgagttcatagagggtggtagcttggataaagtactaaccgatgatacgcgtgcatcaatgtttgattgggaaaggagggtgaaggttgttaaaggtgtggcaagtgctttgtaccatatgcatcatggttgctttcctcctattgttcatcgtgacatatcaagcaagaatgttcttatagatttggattatgaagcccgaatctctgacttcggaacagctaaaattctgaatcctgattcacaaaacataacagcgtttgcaggcacatatggatattctgcaccaggttaggccatttttgttcttaagaatttaatcctatatatacttgtttcaataataagtcctgctacttgttttataatactattttgttattattttgatgaattacagagcttgcttatactatggaagtgaaagagaaatgtgatgtcttcagtttcggagtgctttgtttggaaataataatgggaatgcatccaggagatctcatttcttcattgttttcatcaactgcgtctaatatgctattaattcatgtgttggaccagcgactacctcagccagtaaagccaattgtggaagaagtgatcttgattgcaaaattaacatttgcttgcttaagtgagaatccacgctttcgcccaagtatggaacaagtgcataacgagtttgtgatgccaaaatcatcttctttggatccactccccatgatcacacttggtcaactatctaaatagtgttgaaacttgttttcttgtgtgttgtatgttttttagttcttttggtgtacactgtaattaagcttttcgtgatattaatgtttttctcttgcatgttttgtatttctgatggagtgctttgtatgtttctgatgttctgtaaagacttggaaaataatggaaagttgcttatgtcttttgtaaaatcgaataaataaagtgtgattttgaagggagacagtcatgtttttggtctttataaaataaataaagtcactttatataaaaataaatataaaagctactttatcaaaagaaaaaagtaatgtttttcgtaagataaggatattttgactgtctatttctttgagaattatttggcgttaacggttagccactcgatgaagtatattgcatttaattgaagacactcccaagtcgcattatatattaggactttagtaatctacaagaaaactcgtataaggatattttgaagaataaatttgaatacaaatgttatatattttaattttacacaaaactattatacggatcatttcatttttttcaaatagaaaaaaattaagattttttatgactgatatttgcaacaaagtttaatcaattaaatattttattaaatcaaatgtcaattgattaaaattttatttttataaataatgttctattatgaattttaataaataaatgttatatgaaatttacataaaatgagaaattaattaaattaaattaaattagtttgattggttcaaaattaaaagctttattcattattataaaatataagaaattaatatatttaagagactaaaaacatatttaagattaatatatttgtaaaaacaagaaagataataaaaatattttagtaaaattgatttctaataaatactatgatattggagtgattatttttcttagtttacgtggaaaaaaaattatccctaccctattatacatgccatctcgcagttgttacaaaaggaagacgttcctcacaaaaaaaagaaaaagaaaataaaggaagtcgtttctttgggtccaccaaaaaaaagaaagaagtcgtcttttgataaatcaatctacgagtttctgtaccttgttcaaccaatcaatataaaaaaatattactccatttgaaaatttctttagcttagacatgcgtgatgtgcatttcctatactattagaatgtgactcttatcaaaccaacttataaaataagattatttttcatttatataatgtatatcatctcttatcaatgtgatattttttctcaacaataacaaatatattaattgcataaatagtgatatttagatttatatattttcctaaaatatttttagatttgatgtgtggataatatcatatgtaatttttaaatagattcttatattattctaaaatatggatttaaatttaattaaatcatataatattgacttgtaaagtgaaaattattatttccttatatatttatcttgatattatttttatccaatgtatggcttaattttgttcaatatatatgaggcttcattcttgtttattctatatctaatttcattttatttatttattttcaaaccaaagtggtctgattagggatattttttctaaagcaatatttctctatattttttgaagataaataattccccaaaaaaataaaataggctaaatcaaatgcaatatattttttttttttnnnnnnnnnnatattcttgtccaattatatttttaacatataaatttataactaaagcataaaaaaatattcaaacaagaaaaattaaaaaaaaaagcatatataaaatacttcatctacaatcatcattattgtaattaaaaatataaaaatgagaatagtttgaacattattaatttcgacatacaatctaagatatcaaaataatttgaaaaacttaattaaaagaaagtagtccatacatactaaaagacatttaggattatcctatcatataaaggaatttgttataataacttttttttggaacaagtattaagataatattattaaacaccaaattggaataagatgtaccaattnnnnnnnnnnaaaaaaaaaagggaatgccaagttaatgcatttcagacgatgatgttcttatttccttattatttttataataattgctttaaaaatctatatatattcttgtccaattatatttttaacatataaatttataactaaagcataaaaaaatattcaaacaagaaaaattaaaaaaaaaagcatatataaaatacttcatctacatttaatcatcattattgtaattaaaaatataaaaatgagaatagtttgaacattattaatttcgacatacaatctaagatatcaaaatagtttgaaaaacttaattaaaagaaagtactccatacatactaaaagacatttaggattatcctatcatataaaggaatttgttataataacttttttttggaacaagtattaagataatattattaaacaccaaattggaataagatgtaccaatttaggcgtgaaaccaacattacacaacgaggacaccagaattgcataactctacttcctcttaattcacatgatatcagggacaaacattattaataactaccaatacgttcctcttaattcacatgacatcaggggtgaacattattgatcaaactgaatagaaggaatggccttgtatctcattctccttcccctagatacacaaagtaatagtatacacacaaagaaagttgcaatgaagaactcagcaaatcatattagttttcaatagcaatcccccagctgacaaaggcaaagccatcaatcaaacatgtcggttaatcaaatttttgtttgcacggctctgttgacaccaggggcaattatgtcaggctgaaacagaaaataaagtattgaatgtaagaaaatggaaaagaaaaatatatcatgaagatgaaatgaaatgtagaccttgagtatcaatggttgcactgcattgggacccctggatgagaatccagccacaattggagcaggctttattcctaaatatgttcttgctacagtcatgtaagcaacaagtttcctgcagagaaatttatagattaagtttttcatttgctgcaagtatttttacaatgtaagtaacactgaaatgaaattggcttagtgtctgtttgaattcatgtcagatcatccaaaatgaccttgaaataccaactttcctgattttaaataaatatgtacatgcttggtctcccgttggaaaattgattctgaatcccaaattaaacaatttatccggtggtaaaccgccagagcttggccaggcacccaaattacaacaacttcaactctcttcaaataatataagtggaaaaagtccaaaaggttttcgtaaattgaccctgttgtttactctctttgagtcacaatgaattttctaactacattcccacagaaatgggatctttgctaaaccttcaacatttgaaacttgcagcaaatagtctaactggtccaattccaaatcaacttggacgactgctcaagttaattgacttgaatttggcaataataaattatcacatggccttccctctggatttaactaattgcagtctcttcaaactcttgatctttgtgaacttgttaaatggacaaataccagatcacttggaaagttgcacagattggaaaatttgaatctctcacacaataatctctggcaccattccatccaatttttaagaaattgttaagtttgacaaatgtttacaccaacaactaattagagggtccaattcctgataatgttgaaggtcacggctatggtactgctaagggaggctccccaagagcaagcgttgtggcctacaaagcgtgctggcataaactggataccagagggtgccatgaagcagatattctacaagcatttgattatgccatatatgatggttttgatgtcatctctgcctgcctccgtgggtgcgtctaatccctataccgaagctttgttaacagatgggatatccataggggcattccatgcagttgccatgaacatagtcgttgtttcctctgctgggaatgaagggccatcacctttaagtgtcacaaatgttgcaccctggtccttcaccgttgctgccagcacaatagacagggattttctcagcgacatttctctcagcaacaatcaatccattacggtatcatttttctatatttttccgtaatttatcaattagtttcatatgtttttattatgtcaacttaattaattggaatgtgtgtgtatatatcagggtgccagtcttaatcgaggcttgccaccatcgtcaccgtcgaacaagttctatcccataattaattctgttgcggctagacttcctcatgtgtctattaatgatgcgtaagcacaatttttgttttttatttcccaagcttgcttcaaatatttatatgtacttgtcgcatacgtgtgtgttgaaagcatgcaccgaaagcataggtgcggtttttcaataaatgcacagtaaatgttttgaattttcaacccgtatgcaccgaaagtgcacagtaaaatttgttactgtgcacacgcgttttgcaacctatataaagcgctttgcattcggtttaacgcagcaagcagtaagagtagaagaagagaaaatttaggagtgtgtgagagtaaacaccaagtgaggaaaaatacccatttctgtatttttcttttgtatccaattttgtgtgatatccttgtgaggattattgggtatatttgagaattgggttttgagtgttattttttctcttttgtactcttcttcattctagtggaactcttgatctgtctttgcccgtggacgtaggtacactgccgaaccacgttaaatatctgtgtcttgtctgtgttccattttacttcccattttatttttctccatctcatattttgctttatccgatccaattttcgtaacaaactggtatcagagcatactggttggatatatttgggtggaagtactgttcaatcattattcactattcattggcactatttggacggctgtgaacagtgtatagtactattcacgtatacgtacggtacggtactattcacatatacggtacggtactattcatgtatacgacactattcacagaaaaatagtgtgatccggagcagttattatttggagtatcgtcaacactatggcggcaaaatttgagattgagaagtttgatggcaaaattagttttagcctatggagagttaaaatgcgtgctattttggtccaacaaggactacaaaaagcacttttgccaagagaaaaattgtcagctgatgataacgctgcaactgcaagcacaacaactgcaacaaaaatagcgtccgctgcggagttgacagatgttgatgagaaggctcgcagtacaattattctcaacctctcagacaaggtgttatgcgaagtggtggaagaagacactgcacttggtgtgtggcagaagcttgaaagcctctatgcgacaaaatctcttaccaacaggttatacctcaaacaaagtctttacacacttcgaatgaaagaaggtacgcctattaaggaacatgttgatgaatttaatcgggtaattatggatcttagaaatgttgatgttaaaattgatgatgaagatcaagcccttattttattatgttctttacccccttcatatgagcattttgttaccactttgctctatggtaaagactccattagcatggaagatgttaaggcatccttaatttctcaagaattgagaaaaagggtttctagcaataacaccgatgaaattggtgacggtcttattgcgaggggaggagtcaaaataagggaccagtaaatagaggccgatcaaaatctagaccaaagaaaaatattgaatgttactattgccacaagaaagggcacactaagtgggattgtcctaaactgaagagaaataataaatttgacaaaaaggacaataataatgaaagttcttctgttgttgctggagttgtggaggaaaattcctcagatgataatgttctttcagtcactgtttctgattctagctcagaaaatgagtgggttcttgattcgggttgttcctatcacatgtgtccccataaagattggttcaccacttacagaccaataaatggtggaactgtcttaatgggtaataatatgacttgcaaaactattggaataggtacaattcaaattaagatgtttgacggtgttgtgagaactttgacagatgttcggcatgttccagagttgaagaagaacttgatctctttaggtactcttgactcaattggctgtaagttttctgctgaaggtggaacgttaagagtcgtcaaaggtgctctgattgtgatgaaaggaaaaagaagaggtggtctttatttcttgcagggtgatacagtttatggctctgcttcggtgtcctcaatagtagatcctgattctgacactacccttttgtggcatatgcgcttggggcatatgagcgagagaggcttgaccgaattgagcaaacgcggtttgctttgtggccagaaaacaggtaaaattgacttttgtgaaaactgtgtttttggcaagcataaaagggttcaattcggtactggtgtgcataataccaaaggaactttggattacattcattctgatctatggggtccttcacaagttccatctctcagtggtgcaaggtatttactgactttcattgatgattattcccgtaaagtctggatttataccttgaagaataaaaatgatgtgttccagaaattcaaggaatggaaggctatgatagaaaaacagtccggtaaaaaggtgaaacgtttacggactgataacggtttagaattctgttcaggagaatttaatgagttttgcaggaaagaaggcatcgtaagacaccgtacggtcaagggtactccacaacaaaatggagttgcagaacgcatgaacagaactcttttggagagagcacgttgtgtgctctttactgcaggtctgccaaagaagttttgggctgaagcagtcaacacggctagttatttggtgaacaggtctccatcgactgctattgaatgtaagacacctgaggaactatggtcaggtaaacctgctgattattcttgtttaagaatatttggttgtccagcttatgctcatgttagtgaaggaaaattaaagcctagagccaagaagtgtatctttcttggatatggacagggggtgaaaggatacaggttgtggtgtcctgatcctaagtcacccaagtttctaatcagcagggatgtcactttcaatgaatcttttatgcttcatcagaaaaaggattcatttgatacagatacaaattgtagtgaaagtgacaaacatcaggtggagttacaatttgatgcttcggaaacgatgcccgaagcaattacaaatcagcccacagaagaggaggtgcaacatgaggaagcaccaccactgcaacaggacactattgctgctcggagacaacgcaggcagatcaagcccccccagaggtatgcttatgcagatctagttgcttatgctttgactatggcagaatctttcgaagaagatgagccttccaattaccgtgatgccattacaagcaaagaatctgctaaatggactgttgctatgaccgaagagattgagtctcttcacaagaatcagacatgggagctagtcaaaccgccaaagggccaaaagattattggttgcaaatgggtcttcaaaagaaaagaaggaattcccagagttgaaaatgctaggtacaaggcgcgcttagtggcaaaaggctacagtcaaagagaaggtgtggacttcaatgaagttttttcaccagtggtaaaacatacttcaattcgtgttttacttgcattagttgccttgtataatttgtataataacctaggcttttcataaaagaaataaaattttaaaatttataaaattccgtcgcaaaagccttagtaacggatttagcgacagaattagtgacggaattagcgacggatttttagcgatggagtctggcgccaggagcgccagagtggcgccaagagcgccacagatgctggattttggcgccaggagtgccaggatggcgccaagggcgccagatacactgtatgttggcgccaggagcgccaggatggcgccaagggcgccaaatgcactggaaactggcgccaagggcgccacatgtcggtcaggccccctatataaagggatttcacgattttcagaggaattttcactgttcctctttctcctttacaccaggcagccattagagcatcctcggagcttcaaacttccatcataaacccataaaacacctccctatcatctataaacttgattagaacccttgagaagccaaaatccagccttgttggtgagaattgagagagaaacccctttcccttgaggttttacagaaattgagcgttggagaagcaagaagctggtttcagggagacagagcttggggacaagacttctccagcctttctttgttgatttgaggtaagaaacctctgttttaaccgtttaatttgagaaatggggattggatgaatagtaaccaaatattgatagggccggaattaggcttaggttctttagggagatgtaatcaggaggttgttctgagctatatggcatgttgaaattgaaattgtgatgaagtttgagtttggctctgggaaggaagaaatgtgtgtaaatgagcaatgttagggcctgaagtaacttaagtacctttacaaaagttattcataaggccaaataatcggtgaaaacgcgattagatatgtgttttggctgagttgaaccaatgtgggttcttgactttggtacagctttgaagtgagctgtacagagttctaaaggaactctgaggccttgatgagactgaggcagaccattgagggtcaatgtatagcctagtagaaactgggccaagataaaccttaaggtagagaattttgatctgttttgagtggaaggttgtttccttccatataaacggataaatgtcgtttctgatggtttaattcatgcctactgtagggcgtgaagtgcagcttgctggtagagctcaccacgagactaggggagctgattctgaactgagaccaggtaagctcagcgtttttagggaatgtttccctacttatggttcactgtacccaacattgggtaattgttttgatttgaattgtactctgatgcctatcatgttatgatattgatcctgtattgaatattgatgagatgatctgatgatggctggcaactgcatgctagctaaaccctgagatagggtaggtgcttgtgttgttgtactgagatattgcatgttacttgattatgatgatgttgaggcatgaattgattgtgatttgattgttgtaatctgctggccagtagtgtgaggtactatggaccccattgggaatgtgcccttaagtggatgatctcccttgggataatccataggcgtccatgtaaaccctgaatagatgtgcctttaagtagatgatcctattcaggtattgggcggcaagtcctgagtagatgtgcctttcagtagatgatcctactcgggcctgagccctggatagatgtgcccttcagtggatgatcctatccaggcccagtatgtggttgctgttaatatacgatttactgatactgctctaagttttcagcttatgttctgaggttgagaatttaacaaatgctagtgtacttgatgagattttctgtgatataatttctgattccgttatgatatctgtatagtgatgttatgttctgggaagtgaaccagggagagggaaacctctgaaaaccctgagtttactgagataattatctcacccctgcttggggctatgttgcaggtaccgagactaccgtcactgagagatcccaaggcaagaggcctgagatgggatagagtgaagataaccctaggtttagatgactgagcttgctagctcacttttgattattttgggttgtattttgataccctgaggggtcacttgtatattcagaggaacttggcctatataatatgacagagattcaccatatatgtataacagttatgtatattattatgaattatgcttcctttactgttcattttccatgcttgctgcgttactttgatatcgtataatgataatacgccgggtgcacacggggtgttacaatttggagcttgaacagctcgatgttaaaactgcttttcttcatggtgagcttgaagagcaaatttacatgcatcaacctgaaggttttgttgaacagggaaaagaagatcatgtttgtttgttaaataaatcactgtatgggttaaagcaatccccacgacagtggtataagcggtttgattcctttatgattgaacatggttattctagaagcaactatgacagctgtgtgtatttcaggaagctctctgatgattcatttttgtatctgttattatatgtggatgatatgttaattgctgctaacaacatgtcagaaatttctaagttgaaatctcagctcaactcagagtttgagatgaaagacttaggtgcagctcgaaaaattttgggcatggaaattcatcgagaccgtaaagcaggcaagctgtacttatctcaaaagaagtatattgagaaagtacttgagcggttcgggatggaaagttccaagccagtttgtacaccacttgctacgcattttcgcctatcagcgaagttgtcaccacagaccgacgaggagaaggaacacatgtcacgtattccttatgctagtgcagttgaaagtcttatgtatgccatgatttgcactcgccctgatatttcacatgctgttagtgttgtcagcagatatatggaaaacccaggcaaggaacactgcaagcagtgaaatggatacttcgatatttgcggggtacttcagatgttggtctggtcttcgatcgtagcaatattaacacttctgaaagtgttgttggttttgtggactcagattatgctggagatttggacaagaggcgatctttgacaggttatattttcactctctcaggatgtgccgttagctggaaagcaactttgcagtcaaccgttgctctttcaactactgaggcagaatatatggcgctaactgaggcagtgaaagaagccatttggcttcgaggtttggtcactgatttgggcttagaacaaagttcatcagttgtctattgtgatagccagagcgctatacatttgaccaaaaatcaaatgtatcatgaacggaccaaacatattgatgtcagatatcactttatcagaaatattatatctgatggatctgtcaagattgagaagattgccacaacagataatccagcagacatgatgacaaagcccatcacgacaatcaagttcaatcattgctcgaacttggttggcgttcgtaagacataatcctttattaggatttcttggagaagactgtatcagaaattttattgaagtggagttcagctcattgctttatccccatatctgctggagggggagatttgttgaaagcatgcaccgaaagcataggtgcggtttttcaataaatgcacagtaaatgttttgaattttcaacgcgtatgcaccgaaagtgcacagtaaaatttgttactgtgcacacgcgttttgcaacctatataaagcgctttgcattcggtttaacgcagcaagcagcaagagtagaagaagagaaaatttaggagtgtgtgagagtaaacaccaagtgaggaaaaatacccatttctgtatttttcttttgtatccaattttgtgtgatatccttgtgaggattattgggtgtatttgagaattgggttttgagtgttatttttcctcttttgtactcttcttcattctagtggaactcttgatctgtcttcgcccgtggacgtaggcacactgtcgaaccacgttaaatatctgtgtcttgtctgtgttccattttacttcccattttatttttctccatctcatattttgctttatccgatccaattttcgtaacagtgtgtatgtatgtatgtttgttggtgtagtcgtctttgcaaagcgggaacacttgatcctagaaaagtaagggggaatatactagtatgccttcgaggtgataaattaacttctgttagtgagggccaacagggtgctcttgctggtgctgtggcagtttttgtgcaaaatgatgagcaaagtggaaatttacttctggtcgagaatcatgtattacctgctgcaacccataatgaaagtccagcagatgctgtcaagtttaaacatcagcagcaagtaactaaagttcatatatatatatatatatatatatatataaacacttaatttctacatgtattgttgcaggggggtattaacttgcttgagagcggcaagaacatatataggagtaaagccagctccaataatagctggattctcatccaggggtcccagttccgtgcaaacattgatactaaaggtctaaatacattttgttacaccaacatgacatgatgattttcgttcttacaattaatgactcatgtaagataaacttgcaataatgtgtttctttttcagccagacataactgttcctgttgtgaacataattgcagcttttacacaaggagcaggtccgtctaatattgcatcagatagacgtcgatctcttttcaatgtgcaacatggaacttctatggcttgttctcatgtcgctggcatcacgggtcttctcaaaacatatcatcctacttggagtccagcagctatcaaatgttaataaatcggattccatcggacagaacaataacaacagataaaggaaattgaaagcaataaatggacacaaatattttacgtggaaaaaccctgaggtaaaaaacccacggacaagagtagaaaaaatttcactataggaactccaacactacaaccttcctttttcacaagaagagaacaattttatctctctcttgaactaaggaatactcctcacaaaattatactcaagaataatattataacaaataatattataagagaagagaagaagattttggtgtgaaaaatatgaaggaagggggtctttatttataacccccaatcttcctcccttggcttgttcccaccgatgtgggacttgcctccaacaatctcccacttggagatatgattgagaatcaatcaatctccacactgctctttctctcttgccatctccatattgtctacgtctctgccaggccatatgaagatctgcaccaaatgaacttgtcagtgttgattgattttgtcagcgcatctgctatattctcctttgtatgaatcttttgcacatccacgcttccatcttctaccacttcacgaacaaaatgatattgaactcctatgtgctttgtcctgaaatgaaaggctggattccttgcaatgtgcaaggcactctgactgtcacaatacaagataatgttttctagtttgtgcccgagttcctccatgatccttcttaaccatattgcttctttacaagcttgagtcattgccatatactcagcttctgtcgtagaaagtgccatgactgactgtagtttggaaatccaactaacagctcctcctgcaactgtaaacacatagcccgtggtagattttcttttctccagatctcctacaaaatcagcatcaacataccctctgacagtatattcagatcctccataacatagaccaacatctgaggttcctttgacgtatctaagaatcctcttaacagcattccaatgctctctaccaggatttgccatgaatcgactgaccactcccactgcatgagcaatgtctggtcttgtacaaatcatagcaaacattaaactccctactgctgatgcatacggtactcgagacatctccgtcctctctgcttcattgctaggactcatacttgaggataacttgaaattaacaggaataggggtagaaattggcttacaatcttgcatgttgaagcgtcgcaagatcttcttcaaataattcttttgtgatagccaaattttcctgttatttctgtctcggtgaatttgcatccctagaatcttgtttgctggtcccaagtccttcatttcaaactccctagccaaatgtgcctttaattcttgaatcagatcattgttggggcctgtcaccaacatgtcatcaacatacaacagcaagataatgaaatcattatttccaaacctcttgaaataagcacaagggtctgaactgagtctgttgtattcaaggcttaatatgaaggaatcaaatctcttataccaacacctcggcgcctgtttgagaccgtatagagatttgttcaacctgcaaaccaagttctccttatttggttcttcaaaaccttctggttggagcatataaatttcttcttcaagatctccatgaagaaatgcagtctttacatctaactgctctaaatgtaagttgaatgttgcacacatagccaatacaatacgaattgtagtgagacgaaccacaggtgaaaatatttcattaaaatcaataccttctttctgagcataacctttcaccaccaaccttgcatgataccgctccacttgatcatcactgcttcgtttgatcttgtaaacccatttgtttccaatgggctttcttccttgtggtagtggcacaagctcccaagtcttgttcttatgaagagcttcaatttcttcctgcattgctgtcatccacaatgatgcatccgagctagttgttgcttcttggaacattgatggctctccatcttctgttagaagacagtatgcaatattgccctccataacataatcagtctgccaagttggtgttttcttctcacgagttgaccgtcgaacttctacagtttcagactcaactggttcttcctcctcgtgttctgttgttatttcagaagagacttgttgtccagattcgtctttcacctgaatcgtcaatgtttctgaattattagctaaagtgctacttacatctttcttttgcagcttatcttctgcaaatagtacatctctgctgatgacaacactgcgggcagtaggatcccacagtcgataccccttaactccatcagcataccctaagaatctgcattttctggattttggatccagctttgtgacttcttgggtgttgtacatcacgaacacaggactcccaaatgtatgtaggtgtgaataatcaactggcttaccagtccacatttccatcggtgtctttagatcaatcgcagttgacggtgagcgattaatcacataacaggcagtgttgactgcttcggcccagaatgactttgccatacttgcagttctcaacatagctctagtcttttcgagtagagttctgttcatccgctctgccactccattctgttgcggagtgtatgccaccgtgaattgccttttgatgccttcctgattacaaaaggcattaaattcatcacctgtatattctccaccattgtctgtcctgagacacttaatcttcttctctgtctctaattctatttgcgctttgaatgtcttgaagactgaagatacatctgccttcctcttgattggatacacccaacatctcctggaataatcatcaataaaggacacaaagtattttgctcctcccagggacataactggtgcttgccatacatcagagtgaattaattctagaatatttttacttctagaattagatgcagtaaacttcaatctgtgttgcttacttgtaacacaatgctcacaaaagggtaaagatacctttgtgagaccagggagtagtttcctctcagctagaattttcaacccttgttctgatatgtggcccaatttgcgatgccacatctttgttaagtcttcctcagaactggttgatgcaacagatgtttctgcctccagatacgtctctcccataagcctgtacaagtttgctgcaatcctttcagccttcattactacaagcgcacctttgacaattttcatcactccgttttgaatacgggttatacagtcattttcatcaaattgccctaaagacaatagatttttcttcaagcccttcacatgccgcacattttggattgtgcgaatcattccatcatacatcttcattttgatggtgccaattccagcaatctccaaggcatgatcatttcccatgtacacaaaccctccagaaattggtttatatgaatgaaaccaatctctccgagaagtcatatgccatgttgctcctgaatccattatccatgaatcagcaagctccaatctatccttagacaccgttactgcttcactgtataaaacacttgtattggcaacacatccttgaaaagttgatgcttctgaggttttgtctccaccactccttaaacgacactcacttttatagtgtcctttcttgccacagttgtagcacttgacatgtttcttactcctagactttgaccttccttgtttgtgactcccactggaaccacattccattgaccgtcctcttgtcattgacaaggcttccgcttgatgagaacttgccagcctttcttctttgctccttcgccggctttcctcttcaagaactgcagcagcaacatcgtcgaacactagagattcagtgttattggtgatgttgatgatgagttggtcatatgaatctggaagactttggagtagaatctcagcacgttctgatacttcaaccgtatgttccaacgatgaaagttgagaacatagagaggttagagtattgatgtgctctgtcactgaagtagattcagacatccgaagtgtgtagagcttccttttcagaaatattttgttgtgaagtgattttgatgagtataactttgtgaggtaatcccatatctccttggctgtttccttttcctctatccctgacaatatatcatctgaaagagataggtgcagatcagaaatggccatattatcaattttcttccactcgtcatctgagtatcttgctggccgagcactgatggcctccaaacaattatctttggtcagcaatgccttcatcttcaatttccacaacgagaactttgtcccgtcaaatttgtcaatatctacctttgttgccatggttctatcacgaactgcttttgctgcaaagtaactcccactgcttcacttcggtctccttcaaccagtattttggaaagtgcaccaggaaagtttccaggaaagattggaggggtcactagtggtcccacttaatacccaatctcattagactgtttcgtctttgtgacaaaactttccacacacactttatcacccaaaatacctctccagaggaatgctccgattgcgaacagtaactgtatacagctatagtcactgtataacacctgcaacacctcagtataaatttatactgatatcaacccaacaacttccaaggataattcttttctggtgtgacagatcagtctaagctgcagccacagagcatactaagaaaaaaccttggctctaataccactgttaataaatcggattccatcggacagaacaataacaacagataaaggaaattgaaagcgataaatggacacaaatattttacgtgggaaaaccctgaggtaaaaaacccacggacaagagttgaaaaaatttcactatgggaactccaacactacaaccttcctttttcacaagaagagaataattttatctctctcttgaactaaggaatactcctcacaaaattatacttaagaataatattataacaaataatattataagagaagagaagaagattttggtgtgaaaaatatgaaggaagggggtctttatttataacccccaatcttcttcccttggcttgttcccactgatgtgggacttgcctccaacatcaaatcagctattatgaccattggtactaataattgctatttatatgtaaattctcaatttaaattatataataattattttttttcttcttttaatatttcttttgaaatatataaatttagtttttttaacttttatccaataaatactaaaattagttgatttttagtgtatcgattgtattttttttatataattacacattaaaaatttgaaagatgaattgaggatatggacttagtgcatcaccaatataaaaaaaaagtccaattaaacaagttttgattgtaaaaaggggagcataggaaaatcatcgaaagtcaaaaatctaagacacaaaaaagagaaaaattcacactgaaaaagttgacttatatctcttatttaatggatcttcttacattttctttcattaattattttttccttttatttttgtaagtctctctgacaaagaaagactaaattctacttggagtcgaactatcaaatcagctattgtgaccataggtacattaatattagctatagtaatatatatgcatttttaattacaaaatactatcatatgtatgcagcatatcatttggaaaaacattggaggcttattaattaacaactatgctttttatttatttcagctacaacattagataacacgaatcaaccaattcggaatgcatttgataagaaagcaacccccttcgaatacgtcgccggacaaattcagcctaaccttgcaattgaccctggactcgtttacgatttacgcaccaccgattacttgaacttcttatgtgcttctggttacaaccaagctttagtcaagttgtttgccaatttgaaattcccttatagttttcccaagtcttacagaattgaagatttcaacaatccttcaattacggtgcatcatcctggctcaaagactattaatgttacttgtacagttagaaatgttgggcctccaagcacgtatgttgtgaatactcactggccgaagggtattaaggttcttgtccaaccaatttcgttgacttttaagaaaaatggagaaaaaaaacattaccaatttgaagtcatttcgtctaacaagcaatagtttcactggccccttgccacaacaaatttgccttggtgggctacttcaaaaatttactgctgaaagtaatcatttcacgggtccagttccaaaaagcctgaaaaattgctccagtcttactagactcagactagatgaaaaccagatgaccggagatatatccgatgcttttggtgtatatccaaagttgaactacgttgatctgagtagcaataattttcatggccacatttcaccaaactgggcaaagtgtcctaatctcacaagccttatgatgtgcaacaacaatttatctggtggtatacccctagaacttggccaggcgcccaagttagagagacttgttttgtcttcaaatcatctaacaggaaaaattccaaaagaacttgggaagttgacctctttgctttatctatcaataggcgacaatgaacttttgggtaacattcctgggtaacattcctacagaaataggtgctttgtcctgccttgaaaaattggagcttgcagcaaataatttaggtggcccaattccaaaacaggtgggatctttacttaaattacttcacttgaacttgagcaacaacaaattcacagaaagcattccttgggaatttaacgaattgcaatctcttcaagatcttgatcttagttggaatttgctaaatggagaaataccagcagcacttgcgagtatgcaaagattggaaaagctaaacctctcgcacaacaatctctctggagccattcctgattttaagaatagcttggcaaatgttgacatatctaacaaccaattggagggttcaattcctaacattccagcctttcttaatgctccatttgatgcattgaaaaataataaaggcttgtgtggaaatgcctccggtttggtgccttgccacaccctacctcatggtaaaatgaaaagaaatgtcatcatgttggcattactcctttctttcggcgctctatttctgttattattggtggttggaatttcgttatgtatttgctaccgaagagcaacaaaggccaaaaaggaggaggataaagaagaaaaaagtgaggatcattatttcctttggagttatgatggaaaaatggtgtatgaagatatcatggaagccacagaggggtttgatgacaaatatctcattggagatgggggtactgcatctgtctataaggcaagattaccctcgggacagattgttgctgtgaaaaaacttcatgctgcacccaaccaggaaacacccgattcgaaagctttttcagctgaggttaaagccttggccgaaatcaagcaccgtaacattgtgaagtcacttggatattgtttacatccacgcttctcctttttggtttatgagttcatagagggtggtagcttggataaagtactaaccgatgatacgcgtgcaacaatgtttgattgggaaaggagggtgaaggttgttaaaggtgtggcaagtgctttgtaccatatgcatcatggttgctttcctcctattgttcaccgtgacatatcaagcaagaatgttcttatagatttggattatgatgcccgcatctctgacttcggaacagctaaaattctgaatcctgattcacaaaatataacagcgtttgcaggcacatatgggtattctgcaccaggttaggccatttttgttcttaagaatttaatcctatatatatatacttgtttcaataataagtcctgctacctgttttataatagtttttttattattttgatcaattacagagcttgcctatactatggaagtgaatgagaaatgtgatgtcttcagttttggagtgctttgtttggaaataataatgggaatgcatccaggagatctcatttcttcattgttttcatcatctgtgtctaatatgctattaattcatgtgttggaccagcgactacctcagccagtgaagccaattgttgaagaagtgatcttgattgcaaaattgacatttgcttgcttaagtgagaatccacgctgtcgcccaagtatggaacaagtgcataacgagtttgtgatgccaaaatcatcttctttggatccgctccccatgatcacacttggtcaactatctaaatagtgttgaaacttgttttctggtgtgttgtatgttttttagttcttttggtgtacactgtaattaagcttttcgtgatattaatgtttttctcttgtatgttttgtatgtttctgatgttctgtaaagacttggaaaataatggaaatttgctcatgtctttagtaaaatcgaataaataaagtgtgattttgaagggagacagtcatgtttttggtctttataaaatataaataaagtcaccttatataaaaataaatataaaagctactttatcaaaagaaaaaagtaatgtttttcgtaagataaggatattttgactgtatatttctttgagaattatttggcgttaacggttagccactcgatgaagtatattgcatttaattgaagacactcccaagtcccattatatattaggactttagtaatctacaagaaaactcgtataaggatattttgaagaacaaatttgaatacaaatgttatatactttacaaaaaactattatacggatcattttttttaaatagaaaaaaattaagattatttatgactgatatatgcaacaaagtttaatcaattaaacattttattaaatcaaatgtcaattgattaaaatatttatttttataaataatgttctattatgaattttaataactaaatgttatatgaaatttacataaaatgagaaatgaattaaattaaattaagtagtttgattgcttcaaaattaaaagctttattcattattataaaatataagaaattaatatatttaagagactaaaaacatatttaagattaatatatttgtaaaaataagaaagacaataaaaatattttagtaaaattgatttctaataaatactatgatattggagtgattatttttcttnnnnnnnnnnnnnnnnnnnnnnnnnnnnnnnnnnnnnnnnnnnnnnnnnnnnnnnnnnnnnnnnnnnnnnnnnnnnnnnnnnnnnnnnnnnnnnnnnnnnnnnnnnnnnnnnnnnnnnnnnnnnnnnnnnnnnnnnnnnnnnnnnnnnnnnnnnnnnnnnnnnnnnnnnnnnnnnnnnnnnnnnnnnnnnnnnnnnnnnnnnnnnnnnnnnnnnnnnnnnnnnnnnnnnnnnnnnnnnnnnnnnnnnnnnnnnnnnnnnnnnnnnnnnnnnnnnnnnnnnnnnnnnnnnnnnnnnnnnnnnnnnnnnnnnnnnnnnnnnnnnnnnnnnnnnnnnnnnnnnnnnnnnnnnnnnnnnnnnnnnnnnnnnnnnnnnnnnnnnnnnnnnnnnnnnnnnnnnnnnnnnnnnnnnagaaaaaaaaaaagaaaggaagtcgtttgtttgggtccaccaaaagaaagaaagaagtcgtcttttgataaatctatctaaaggtttttgtgtcttgttcaaccaatcaacctaaggaaaatacaactccatttgtcaatttctttagcttaaacatgcctaatgtacatttctacactattagaatagctaatatgagttttgatataactaaatcttaccaaaccaatttataagattatttttcatttatatattttatattttgtaaatctctaatcaatgtgatattttttttctcaacaataacaaatacattaattgcacaaaaaagtaatgtttagatttatacatcttcctaaaaaaattttggacttgatgtgtagataagatatatgtgaacttaaaatagattttcatattatccttaaatatgggtttaagtttaagtaaatcatataatgtaagcttaattttggaccttatttatctaaaccagaagcaatttgcgattacaactgaaagaggagtcggacttagacgtacctgttccaaaataaacaaggtgatattattgcataagctagaaataatgggaagatgaaggagatgcatgatatggatgcgatgtttcaccaagctggtggagccctcttaagtgttgagagtttcatccttaggatagactttgctgagtttcacttctggatttgcattattttatgggaattgtgacagactccttttttcttttttttaatagacgcattcattaatcattacagagctttgtttgacaaagttttatgtttggagagcctcctccctctcaatttaatactttaacgtttgctatgaatttatccgctaatataaagaacctcttatattattacaaataatgtacatactatttcgaaaattcttcaagatacaaagtgaagtcacacgggattcaggtcttataaaatatatataaaaacgtgtaaagtgaggaagagtgactatcgatgtaccctttactttcactttttattttataatttaaatttttattcactttaaaaaaggcaaaaaatgataataaaggaatgaccaagttaatacgattcacacgatgatgttcttatttctactaaactagtaaagtgacccgtatgacaagtttgaattttgaaaataaatatatctatattatatataaagttgatgatgcacatcttactaaagagtaaaatgattcagtatttatatgttcaacataatcattatattttaaaaaataataataaaacttactattacattaattaataatttcaacttaattataaatttaaatgtaatttatgagaaattctaaataataaaatgatgtaatttctaatatgtttttatagttacaacaattttttttagtctctataannnnnnnnnncattatattaatatataaatattattaaaatacatatttgcatattaattaataatattagtaacaaaagaataaaattgtgaacgagtaaagttagattttgatgtaacagaactttacaaggttaatgggttagaattcagatgtgactttttaaactagttattataaaaattaataattttattatatgagataataataaattaatattttatagcatagaatgtatatttcaattttctaaaaaaattatgacaggtgaagagcaggtaaattcgaactttttttttatatcaaattatgtggtttaataaacttatatattaaattaaatgattttaaaaagtatttatcaaagataagtgattttcacgtttagcattaattgtaattatatttgacgtagaacagtgacatttgcatcaacagtagctaatgtagaaaaaatactttttttttttatattggttgtgattataatgaatattaaaagtcaaaatcatttatcgttcacacataattttcaaaatcatttaatttggttaaaaaaaaggggtaaattctcggctccattaccatcaacggtgtaagaatatgcttctagtttcaagatccttctttgtgtttttggcttccttgtaattttgacttctctatggtagtagtagtggtggggaaggaggggatggtacggtatcccgtaaagccactaacagaaaaagagagaaagtacgtttaacaaaagaaaataaatttgagataaaataaaagcttaaagaaatgttttttttgttatgagaaacttatgaattttgcagctagtccttaataattttttcttgactattgtcattgaaaaatagacaaattttatatttggtcccttgaattttttattttgtattttttcctaccaatgcattacattggttttgttaagtgctccttgaaatatatttttatttgtcttttggcccctaaaatgttttccatcaattggtgacatctcaaattaacaaaatcaatataacaacagagattaaatataaaataaaatattttttaaggatcaaaagtttttgtttttattaaggatgaaatacaaaattgatgaatttttcaataataaaaaattatttgagcattaaataatatttggcatattacatagtttagtttggatgtaccagatttgtattaccaccgcatcatcagatcatttggagtagcgttattgtgtactgtgtatagttgtttcaattgttttaaatattaaaagaaataattacataaaatcaataatcttgttttatatatatatatatatatatatatatgttaatacttattttgatggtttatttaaattaagaattgttcacatcgggaggataccataggaggaaggagtaccttgagattcaactgctctgctctactccccccaatgctaccctaaccatgccagactcaatggttcatggttaggaaaagaatcatttgaactctatagaaataaaaaacttttactaaatagaatgataaatactctctccattgtgatttagataacttttaaacacaattattttttatagttttaacacaactattaaagatatgtaattaatatttcaaattttataaaatatattatgtagcattcttgagaataaacttttatttcgtggaacaaacataaatgcactctaagagtacttcttggaaaagaaaataaatttaatatttcattggttttgtaaaacaacaatatatatatatnnnnnnnnnnnnnnnnnnnnnnnnnnnnnnnnnnnnnnnnnnnnnnnnnnnnnnnnnnnnnnnnnnnnnnnnnnnnnnnnnnnnnnnnnnnnnnnnnnnnnnnnnnnnnnnnnnnnnnnnnnnnnnnnnnnnnnnnnnnnnnnnnnnnnnnnnnnnnnnnnnnnnnnnnnnnnnnnnnnnnnnnnnnnnnnnnnnnnnnnnnnnnnnnnnnnnnnnnnnnnnnnnnnnnnnnnnnnnnnnnnnnnnnnnnnnnnnnnnnnnnnnnnnnnnnnnnnnnnnnnnnnnnnnnnnnnnnnnnnnnnnnnnnnnnnnnnnnnnnnnnnnnnnnnnnnnnnnnnnnnnnnnnnnnnnnnnnnnnnnnnnnnnnnnnnnnnnnnnnnnnnnnnnnnnnnnnnnnnnnnnnnnnnnnnnnnnnnnnnnnnnnnnnnnnnnnnnnnnnnnnnnnnnnnnnnnnnnnnnnnnnnnnnnnnnnnnnnnnnnnnnnnnnnnnnnnnnnnnnnnnnnnnnnnnnnnnnnnnnnnnnnnnnnnnnnnnnnnnnnnnnnnnnnnnnnnnnnnnnnnnnnnnnnnnnnnnnnnnnnnnnnnnnnnnnnnnnnnnnnnnnnnnnnnnnnnnnnnnnnnnnnnnnnnnnnnnnnnnnnnnnnnnnnnnnnnnnnnnnnnnnnnnnnnnnnnnnnnnnnnnnnnnnnnnnnnnnnnnnnnnnnnnnnnnnnnnnnnnnnnnnnnnnnnnnnnnnnnnnnnnnnnnnnnnnnnnnnnnnnnnnnnnnnnnnnnnnnnnnnnnnnnnnnnnnnnnnnnnnnnnnnnnnnnnnnnnnnnnnnnnnnnnnnnnnnnnnnnnnnnnnnnnnnnnnnnnnnnnnnnnnnnnnnnnnnnnnnnnnnnnnnnnnnnnnnnnnnnnnnnnnnnnnnnnnnnnnnnnnnnnnnnnnnnnnnnnnnnnnnnnnnnnnnnnnnnnnnnnnnnnnnnnnnnnnnnnnnnnnnnnnnnnnnnnnnnnnnnnnnnnnnnnnnnnnnnnnnnnnnnnnnnntaaatcaaattaattttaattgattaaaatattttttcttcaaataatggtctactatgaattttcataaatacaattaaacgaaatttaacaaatgaaaaaatcagtcaaattaaatcaagtaaaaagatactgtaattaaacttcgtatagggtaaataaagtattactataatttttgttattatttgatgttaaaaatcattaataagttttttaaaaaattaagatgaaaagctgtattaatctaaagtttattacgtgacattatcgttgataatatttttttaagaaaataataaatagataaggaaattatatgttcgctataaaaaaagagtgatagggtttacttggttgactattgactgtataaactaaagtagtctaaaatctactttcaaaataattcctgaaaagctaactgtttggtttttttagaagtagtcttcttcattttattttttttgaaataattcctgaaaaacttaaagtaaaataggctaaatcaaatgcattacttcaacgcatgcttgcttccttgattccaatcagttagatcactcttgcaactccaatatgaatgtaattaagtagttgaagtgctgttggattgattgaaaatcatctagccccttcttattttcaaccgttggaatgtagtgtgattattatctcaaactcacccaaattgaaccaaattgcaattgattggtttgatggtaaagatttgacctataaaataacaccatttaacaataatatgcatactgcttgaggagacacaaatgaatctaaagtcacatgactatctaaactgatggactgggttaaagtattaggcactttaattgtaaataactggcatgtgcttagtcatgctgccttgtatgcactggttgtatgcaaccaaggttttaaattacggtcaggtcccgttagagtttcattgcagtatttgatgttgtggaaaatttcagataaatgtaactgatgtggctgcgttgattttatactgcagcagaaattgtcattggataccactttttaaaaccttgaataccattttatagtaagagtttgaaaatttttccttttggagagcctcctcttattcgctaatatgaaagcctattcttatccagaatgtaaacattctttagttaaaacttcaagataataagggaagactaattaaggtcttcaagatatacatagtggaagactaagattgatcatgcattcagcttttataagtagactaagtgtaaagtgagaaaggaaagagtattgattgcacctttacttactttcactctttttttatatcacttttaaatttttattcgcttttaaaaagacaaataataataataaaaaaaggaatgcccaagttaatgtatatcagacgatgatgttcttatttctagcgtggtgaccaggccgacaagtttggttttgaaaaataattatatctatattatatataaaattcacgatgcatgtatttttaaatattaaaatgattctctaatgttcaatataatcattatactttaaaatattaatacaacttaatatatattatatagtaattgcagcataaatgtaagtaatgagaaattctaaataataaaattatattacaggaaacaaaggttacaataatataagctaaataatataataaatttatatttaacttcattgagtaatgtctatttaattggtgtttacacgatgtatttacaaattaaaatattagattaataatctatattaatatataaatatattaaaaatatatattaaaattttcatagtactaatcttacttcatgtataattgttggaacctaaatttgaacttttagtagcccaaaccaaaaggtcaaatttgaataggcaaatatgactgaagtaagttcagcagctcttaattctaagaagagaaaaaaaaaaagttcagcagcaaaatggagcaaaataaatcacataaagcccaaacaagatgtttctggtatcaatgggcagaatattaaaaaaatattttgataagtaagctgatgataaggttgttacggtttatcataaggaggccaagtcaaaaaggttggttaatcagattaactgcatcattgtatatatatagcatacaattagaaaagaaaataaacttagctctacataaacttgcatcattgtatgccacacaaaggaaatgtctaaagatcatgaaatttgataaattctgaaactcagtaggtttttcagaagaaaggttgagagccaacatttacaatttagatatgtaggaattctactttatttactatcagccaacatttttactacttgtaataaacataaaaattacaacttttcaatattccagtaatcttaatctacaaaaaaaaaggaaattaaaaacattttcccaaattaaaaaacaattactgacttgaaagacttattcaacaaacgaaaataatacagagactatgttctgattctgcaatcctaaagtaaatattaaacagagttgctgcaaaataagaaacaaaggcccagcaaaatacatcacaaagatccgctggatgcatggatcactgttatatacaatggataacaatttgctgacttaaaaagtcaataacaatagataattaaatcacaagcactgaaagcaataccagtagtacactagcacttcctataattttgaaaaataatacaaggtgacaacattaaagtagctagagaaaacctaaattaggggtttaattatcatagaatttgatcttaaccccacaaaactgtaaggtgaggaatgccaaagctttgtaagacctcaattgggtgacccaaatgcccaataacagatttatgatatgctctatagctattttaaaatttaggtttaagacctatcaggatctcacaaaattaaactgtaagctagagactgtctaagccttataagaagtaaactagtcatatctttattcgacctggaatttgttgcagcccaaacatacacaatgcccaagagggacaccaaaacacccatgcacttcaaggactaccagattagctgatcaattagaattaggattatcttttagttagtttatcttatgttgccatttagacttatcgtaattagaattcagctttgttagtttagattacgataaaagtttatctttaatgcatttgaattctgttaggattagaatttatctttgctgcatttgaattctgttaggattagaatttatctttgctgcatttgaatttgaattctgttaatatctatttattgaagttgaataatcagaaaaggcatagaaattttgtagaaaatctctcttctcctttctgtgatttcctcccatctcaactcttcattcttttctaaattctggttacgtgacagtgctacagaatttcaagaaattaggattaagaacattgtacaattcattaatgtgaatatttttaatcagaaagaaaaagtttcattgatcagttttacgaccgtatgttattacttgttagaattatctttgcatataagctccatacatgattgtgagggtgcctaatacaaacacagctccaatgaaacgatgttcgatacaacattctaataataaaaagcacttaagactttctacctaataacatcaaacacaaacgacaatgataacatttctgagagtaatttctaaggctacaggattacaattggactggttactgtgtgattgccatctgtccaagacaagttcccaaatactggaaaaccacgactaggccaactggttgcctcaagaataacacgaaagctcttcttttctccaattgtcttgaaagccaatgaacttggttgaacaagaaccttaaatccttcaattacgttagctttggcaacatatgtgctatttggagtccccacattggtaactgtacgagtaacacgtatagggttcatccctcgatttgctactgcgatcgaaggatagttgagattttcaatgttgtaagactttggacaattgtaagagcttctatgaaagtatttgagaaaatatgggttgtgatcatgggcacacatgaagttcaagtaatcccttgttctcatatcataaacaagtccagggtccatagcaaggttaggctgaatatgtccagagccataatcaaatggagttgctatctgatcaaaggcgtcccgaattggtaggttgttgttatcttgtgtggtagctacaggaatagcataatttctatcagaattttttttccagaatttaaagtgcaattttttttttcaacatttataacagattttttattttgcatttttagttcctcagatgtcacaagtgtgtgatttgaattttatctcatttatcatgaggttcctctatcctcattctatctaatatttaacaaaattagctaatgtgacatactgacatgacatcttaaaactctatttaattactgatatcatgtctgtttgtcacatctgccaattccgttaagcgaaatgctagcaattatcaattgatgccattgaaatttaaactacaaaaactgaaagattaaaaatacaataaagccttaattatatttttgactaaggtaaaagggtaatcaatgtttcttttggtatatgcatatagatgtattatttttgccaacataccagtagtcataatggctgatttaatagctgccggactccaatcaggatgaagtgttttgagaagacctacgacaccagcaacatgagggcaagacatagaagttccctgttgtatattgaaaggaacacgacgtctatctgatggttgatttgatggacttgcggctagtgaataagccgccaatatgttgacaccaggggcaattatgtcaggctgaaacacaaaacagagtattgaatgtgagaaaatggaaaagaaaaatatatcatgatgatgaaatgaaatgtagaccttgagtatcaatggttgcactgcattgggacccctggatgagaatccagccacaattggagcaggctttattcctaaatatgttcttgctacagtcatgtaagcaacaagtttcctgcagagaaatttatatatgaagtttttcatttgctgcaagtatttttagaatataagtaacactgaaatgaaatggcttagtgtctgtttgaattcatgtcagataatccaaaatgaccttgaaataccaactttcctgattttaaatatatatgtacatgcttggtctcccgttggaaaattgattctgaatcccaaattaaaccattaagtgatatatgattacctgctattgttatcgtcggaacctcctttttcaaaccattcccgttcatcaatatccttatcctgactgacatccacatttgcacctggtatagtataaggctcagctagaagtgaaccgccactttgcttgctattgaccacaaacactcccactgcgccagcattagcagcttcgtaaccctgagctactgatgttgttttatcatgtcgaatgcagatcaatatgtttccctttatttttctaggatcaagtgctcctggcttgcaaagaccactacggtagtaacacactcataagaaacaagaagtaataaaaatctaactaataacgtaaatattcgaagcaagttaggggaatttgagcctacgcatcttgaattgtggcattaggaagtctagcattgacagcatgaaccaatggataaaatttccgtgatggtaagcctctattgagactggctccctgatacatatacatgcaacccaattaaattaaattgatatataatatagttttccacttttccctatatactaatcatatagcaaaaaataaatttgttatttattctgtcattcaatcacaaattgtcatatacaataagtttgttcacttttatattaattatcttacaagttatattaagaatgatttttctaattggttgatggtgcaaaattttttgtataaactgcatatctattaattaaattcttctagttagatataaaagaaaaatgttgttcatgttacctttaggtgatgtttgttaccaagagaaatgttgctgagaaaatccctgtctattgtactagcagcaactgtgaaggaccagggtgccacatttgtgacagttctaggtgcaggtccatcattgccagcagagctaactacgactatatttctagtaactgcatggaatgctcctatggaaaccccatctgtgaagaaagcttcaatataaggattggagccacccacagaggcagaaatgacatcaacaccatcgtatacagcataatcaaatgcttgtagaatatctgcttcatggcagctaccagcatcatttgtagaccaacacactttgtacgccgcaacacgagccttcggggatccaccctttgcagtgccattgccattgccaaagatggttgcaccaggaacaaaattaccagcagcagttgacagggtatgtgtaccgtggccaacaaagtcacgtgcagtgcgttttaagggatcaagtttgccatattgtgcctcgtaagcttcactgaagactcttgctccaatcaacttcctgattcattcatcatcatatagcatagctgtgtattatctatatttctttttcttggtgtatttaacacaccaacatataaaatgcttacataaaaacagatccgcaaaagtcagtggaaatagaaagtgcatattgggcttcatgtatatatacatacacactgtcacatgctgatgcacacacaaatgtgcctgctttatgcatgtactgtcacatgtgctaaggaactttttcatttgcttacaaatgtttttaattaaattttatgtatttattagtagatttagaggtttgaatttataaattcttacaaactactcagattaccctaacgttattaacattttaaaattgcacataaataatcaaagattcaaagttttatttttgtatgataaaagatacaaagttatatatctatgtataagtgtttcatttgacatttaaagacactggttagtgagattaaagagacagacaaaaaatgttaaaaatgacctgttacagaatgttttgtttgaaggtctaaaatggtcaatctgacagaccccgttcccacgccactttgatggcacgggactgtatccattgtcgttgaaacttatgtgttcgggccaaacgcctgttccacaagtaaaacagtcagtaattcacttccaaccacgcgaacatgcgtgcacacacacaaaataacaacttcaacaacaataacaaattaaaatttgattgggggtataagtattatgggttcatttctaaagtatataatagaagtatctgttcttgaaatttaatgaattaaaattataaagtacttcatattaaatgaaaattcatttttttcacatcttaaaaaagtgtgtatacttttgaagtgtggaggaagaaaaaagtgagattgagataattgatatgatgaaaaggaagaaagaaataaagaaaattacaaaataagtataaagattaagatgtaaaaaatgttcaaattaaaaataattttatatccttttatgatatgttcttattattataaaaaaataaatatacttaatgtcttaaaatatataaaataaataaatattttcatttagtaattgggaacattattaattaattcagcacaaaaaaaaaggcatatatattgttaatagggaaaatataaaattaaaggcaatagaaatggaataacacatcttccgatccattacattctttctttggcccaaaaataaataatgtgtaagaaaaaattatagaaaaacatgttgataaactcttatctaataaacaaactcagtttagatatgccatatccaaaatctcttgtattaagagcaactaaaagtttagtgtacctgaatcaaaattagcaatgattgtattttcgccgaagtttccgttccaccaagcggattctgcaggtattcctccatatttttccagcccaagaaagtcccacgacctggtagtgtgcaatttatactctttgctcaagaaaacagaaattacacttgccttttctgcaccaatagatccaaacacatatatgcgtacagcatcaaaatgcgtagttataatttatatgtacggaagatctaaaagaaaccatggtaatcatttattagctcacgtccaatctctgacgcctcttcctcttcaagtagtgcagcaaagccattgatgtgcttattgtacgagtacatgactgcttcctttgctttctcgtggctgtgaaaataataaacaaacaaaaatattttagtcatcaactagctagcgtcacagaataaagattatttttttataccataggattgcatggaatgagagcaagtcctggaggactcagaactcgccctaacacaatagtaaaattgtatattgatgacttatggtaccaaaatatgttagttttttcactgagacaaatctccttcaaagattttaaaggtaggcaaaggttagttggtcccttccaaccaatttttctctatatactaaagttagaattcgaactaatacactagattttatatataccttcctaagactgatgccagtaaatcataatgggaatttgtggctgactcaagatcgcgaagtgaaggacttggaccatgagaatgctctcccaagtatacaatgtaggtctgctaaagagaatcaaatcaaagcataaacatgtgaaaaatagtatatccaacagcaaaatgtgaattttgtagttgaagttatgtgaaattaaacacagagaactgtattagatacttgcctttctaagagcatgtgtgtatggctgcaacatagtgcaaagcattattggtgataggagaagtttgaagagggaggatgcagccatcttcaactggtttaattttctgggagtgctgataacgcgcttccttatataaatattttcaccacgttttattggaggcaaacatggttcttatgccattctttgtccttaattattcccagcaagtacaacgtaattttgaaagggaactgagttaaactcctcttttttattaaaaatgaaggtttgcacggactaggatcacctgtagagtgtacaccggagttcagaaaaattgcacagttctgactcctaacgttgcatccaatttatataatgtaaatatattttctacgttcaaattgtatgaagaaaacgttttttatggcctatattttgtgtagttgtttatacaaatgtagtattcggatccactatttgcttatttggtatgtagttaacagttaaggatacatttgacaaaagaaacccgtatataattgaaaatttagaagtcggctgaatctttataaggtaaaagttaagaattaaaaacccgaaaacatataaagtaattgattgaaagtgtttgttgagtttagctacgctacgacaaaatgatttttagtggcaattaatatttcttttaccgacaataaaaatggctacgaaacgttttaccgacaatatgtcattagcgcgccattgtatcatgcttgggctggaaatagaagtggtccatggcgccaacaaacattaacagtttatttaaacttaaaatatgtaattaaaaatatatttattttacttgtacgccttgagataaatctatctaattttacctggattaattagttgtgaaaaacaacaaataattataaatataatcaattatatgaaataagtttgccaaaattaaaatttgatcctcttatttttctcaatattgtaattttaatcgccctattttaaatagaagtatttaatcctttaatctctcaattttgcttatatttactcgtaacctaatgaagtcaaacatcttggtagccgcggaaaggtttcatgaagggcacctctatttgtcatctcgatctccttgtcatatgagttcaaagttatccaaagtgtgatgagattttattttcttgaataaagggagcttagcagtttcccaaactcaaaaaccacgatggaaaaaacaaaactaatattaacattttagtaaaataaaggaagatgaaatctggaacaacattgaaaacacgaatatatatatatatatatatatatatatataactagtagataatatataaaccaaactttgtcatgggctcatggcatcatcacattgatttacttcatgagaaatgtgatcccattgaaaaacaactcctttctctctgtacgaggtgtgcatctaggtcaaagcatatataacatgcatgagatttatttctagaggagattgatcagggttgttcctgaaaattttttggtctagaatgaagtgaaaagaatggacccttaacacataaatcttttaaaatacaaataatattaaaattaagggatggaaaaaatggacccctaatatataatatttttgaaatacaaataatattaaaactaaggaatgaaaaaaatgggatcctaacacataaaatgagtccctaatacagattttgtttttatttttttaattttttttttacttaatgctatccgtacaaaaaaatttgggtgtgcccgcccagggccggccctgagattgatcgcctaaattaaagagagtcagactctgaagatattacgaatcccccttttccaaacatgttttatttcgtacactctcccagaaatgaagcataggctgcaacaagtgacgattatggtcacgtacgtaagatgcttccacaagcaacttgtttgctatggagattgcatgcactaccttagttaactttgaacctcccaagggcagggttggctcaactaaattttgagagacttttttatttaaataaaatgttacacacatatataacacacacacatatatatatatatatataacatttttatgttaaaaatttaataacaaataaatatttcttttgcctaagtgagggagccttccacgaaaccacctgaaaataaaactagtctctatcaagttttatgttgtgaactaccaattgtttcttatccatgaccaacaaagataatctaagattgtccttgttattttaaatgatgaccgtatcatttttgatgatattgtacttttgtttatgtagcacttgatgatatgatacttgacgaaaattcctcactcagtatttttataatttggatgatatataaagactaaaatataacattccatttggtaagagcaaatcaaaaagagtggattaaaataggatagtgatagagaagagagacatagctagaaaatatgatgaaattttttagtatgagtgcattaaaataaattataattaaagattatcttaaaatatattaatgatgtagtttaataatgtattcataataaaaaatagaaatatgtacgttaacaaatccatatgtaaagagagagcaaaagaacgaataatgtattccaaaagtaactttaaaatgttactctttatcttaatatttttttaaaatttaatagttaaaattagttattcaatataatcattacattttaagaaaataaatgataataatgacagtaattctaaaagactaagaggaattacttttagaataagttaatctctttatatatatatatatatatatatatatatatatatatatatatatatatatatactccttttccgttggagtgcgtaattctagatatttagttaaagaaaaacaaaatagtcgattttctctcctccgtaacaatcgtttttaatggtgtcatgggcacattgcaacgccgatctgcacgtttagtgttctacttatgcgctagcatgtttgagagcgacaacggagaacgaataaaatgagaatttgagtggattcgaattgagtgttgtaaccaatgtatataaactagttgtatataaactgttgagaaaatagcctatagtccatgcattataaaataattttatattattatttaatcacaaatcaaatatatatactaaatttattaatatttacaataattatcttaatagtcacactaaaaatggtttttaaatgattaatactacaaatttttacattgacagtacataattattaaactttaaactatttttgttttggtaagttggattgtgtaggtatttggccaaagcagtggaaaattttttggtatctacctaccaatgcttagttcaatgagaattggtacattatatgaagcgtaccatcaagagtacaacatttaagatgggtttcatagcctctatgatgaaaagagacataatgacattaattttgattgtttggatattcaaaatgaaacaaattaattttatacagtattttaagatgaaatgaactaaaaatccaattttatttaaggtgtgtttgattgtgtttttattttttagattttaaaaactaatttttagtgagaagtgaaggaatatgtaaaagtacaagaaagaacatgaatgacttggaactcaaaatagaaatccaaaataacttgagatgttttggatgggattgatttttatttttaaaaattacttttagttttcaaaaactaaaataaaaaaaaaacatttgatttaaaaaattctaaggatatgtttggttgaggaggaaagaggcgaaataaaaaggtaactgaatctcaaatcttctatattttactttaattcaaaaaatatatattttatttctatcttttaaatcaaacacaccggaaatgaaaccttaatagaaattttgtttgctcgaatttgagcttgtggaaatggatggagtaggtggtgcgactttagccttggaagaatttagacaatggtgatcggagtggtggagcaaatgtggtggtgaccatgaatgagaacatgaacttaagggagctctgacaggagaatcataatggtgtggtgtcacattaaaaactaaaaaataattttaaaaacagttttcaaaaactactttttaccaaccatgttttacttttctaaaacaatcagttctaaaaaaaacatgaaacaaacagggcactgagttctttaccataatttcatatatttattgttctattcattttatctcatttcatttcatccttacactgcttggaaatattgaaagacaaaagaacagaaaaaaaatcataaaataatacctcctctatttggtaattgataaataacaaaatatttatatgtcaaacctttttcttaacatatataactttttatgatttaaaaaattgataacaaacaaaattttattggttggcgaaaagcttaaactttaattatcatacccttgggcaaccttgcctccaaaccacctaaaaactatctaaaattattatactcttttcttcttttccttttctttccttccactttctggaaccaaacaaacccttaataacaccatcacactcctctaaataaaagaagggaagtagactacattaaaaaaaattatatgttgaaggctatcaacttatacatatgcctctagtaaaaaaatactcaaggctttagacagaggaatcgtttcataacatgtggtggcattcaaggcttcaatcatagtcatcatttcatattagtccagctcaacttcagagagtaattttgttgcaaaataaagactatccttggagccaggtatcagcattttttatttttcgttttgggcttgtagcacctttcagtcagcaatttccttttttacctctagtaaatgcaaaacctgctctgctttctattaatgtttgcaaatgaaatatcaagaatcgtacgtaaacaaaaacatgctatatcagaaggacaaagaaaactatacagtaaattcactaaattcagttgttgttcaggcatgaaaatcttggaacagaactcattactcactagcaactagcaattattgcatctagggagcatggaccaaatgcattagaatccactgttggaccaagatttcacatgcggtccacaaaaaaattggatggtagtgttaagggaaagtagcttttgttagtcctaactcatgaatgctggaatgtgcaactccaacaaaatcttacctaccctgatcatcttcattaagatcaagtaggtgggaagaatctattgagattgaatggcaaagtatagaattcttcatttctattatctcctttgaatgttctaaacttcacccaccacggcatccctcgatctttctttgacctttctacctcaagagtgttgtcaagaaacactgccactatcaaacccactgtcggaggtgatgagaataaggtatttaagaatgcattgaactgcaaagatgaaaattttgcattaagagcaagtaaactactaaaaggctattgatgttgacaagtataaagaacaggttaggttacatatcaaaacaaaaattgaaagtacaaatttcttgaaagaagtctaaaaacaaatagcatgatggtaacccgttagttgataaagcataatatagatggctgaggaaaagtaaaactcacccatccagcattagtatgaacaaggccacgtcgtgagggagtccagtattgattgaaaaattgaggaacagatattccaaggaaaagtgtgagtccaatgataataagatttcttatggagttcatgtttgtgaactgaagaaatgatattccaattgaagctgatgaacaagggaaagtaattgtaaatagatgaacaagagaaaatgtattgcaatcaaatctcagttctgattacatgacatacccacaaggccaaagagaatacagtatagtgcagcaaatattgggaagggtatagaagcaaacacagctccaaattttcctacagatgatgacagaaaaagaaaacaaaaaaaactcaggtaagtggaactatcttttctcgtttataatttatcagagtaaaacaatttccatgaataacatgatgaagaactggtttacttctattgtaatccaggctcatcttcgatttgtctctaccaacctaaaatagagaagaatatcataaagccagcagaaatctgaacaactctgcgacttccaactcgggttagtccaaggagtcccacattttccctagaataaacaaccatgatgctcatcaagctactatagaaagatacatggatcatacacaagaagctgatgcagttaaaactcaatgaagagttagacttacacagaaacagtggaaccaatcgctgttccataaagaccatcaagtaagacgccaatcccctggataaaataaacaatcagttccatctctcaatcatatcaacctctacaatatttttaacttttaatgaccggtcacgggattgaagtcttaaaactattcaaattaatacacaggcataagctaggcaattcaataataataaatgacttgtgccttgtaactaacctgccaaccaatgcctcgacttaatacatatgcaggaggtggagtagcaattgctagccgagaggccgccatgtatgcaccagttgactgccacaagtgcatggtcaagatgtcaagacattatagaaaattcactaaaatacaatgagacaatttatggtgattgtaatcagtgttttgtttctttagtcatttttggggcctgagaccccttggtcaaattttaaaatatgaatctgtagtaacaactaacaagtactgggatagaacatacaaacactaactctgcaggtgagacttatgtcaaccagaaaaataaaaacaaaatcaggaaagaaaatagatacctccaccattgagacaataactgctgacatcatggcaaatgaatggccaacagaaaatgtaggtggaccccattggaaaggatatgggaacatgaacctagtacaacaataaaaaacctcagaaatcagcaaaacctttgaacctatcagaagaaattagaacaggttttttcaggtaccatggggcagttgatatcagatttgctctgtctgttctacagctatgttgtgttatgtcaggcttgtgtcggtaagctccactggcggtcaagataacagcatagatccaaacaaaggggacacaaatcaacactggaaaacgttcaaatatagggatatctctaaatggtctcacgtgctttagatactgcaatttatagcaaaattgtttgccttagggaaagaattataatttgatgcaaaccacaattttctagttagagcacttacttgtgacaaaccaattaccaacaacagcattggtataccaatttctacacagtcccccaactgaaaatgaaaataataaagaacattgagtaaatttatgaagatgttatgaaacgtacggcatccatcaagctatagtgagcatggtcaattacaagattctgaagaagaaaatgccatcaatatttgcatgcaacttaagcattatgccactatcaaataattcagaaatattgttagcatgttgaatgaaaggatttttcaacagaaaatgtcaccaatatctgtattatacaaattaagcatatgccgctaccaaataattcataagatgaaaagtagacaaaaccttcaatccatatataatgaaaacaaggatcaaatttcagcattgaaaattggattcacttaaataggtgacaactcggagataggattcaagataagtttcttaaatattattatttatcatcattcagaataaattgctgtcaatagaaagaccatttcgtcacaattttagttgaaatcgtgaaaattaagatggagatttgagccacacctaccacagggaatccacgttgaaataatcctaatccaaccaatccaactacaggtgccatgccaaggggactgaaaaatctggatagaagatcaacaaaacaaaaatgcttcaaaattttaattagaaattgtcaactcataaacatgtcacatgatactagtataccttgaaaagagtccccagacctggctgtaacccaagattatctgaatacttgatgctacaatcaaagctccctgtattgcacgcattgtttttataaatctctgcaaaccaatcacatggaaagatctcttaaaccaaaaataagaaataaatctaactgtgtttctaagaaagtttatataacttatgttgcaccctaataagaaccttatgagaatcacacaacaaaagctagtaattgtaattagagagcctgaggccttataaacctcctaataaaatttcatacttccaatgtggggactcaagtcccatatctttcaattggatcataacatcccaccacgctccacagtcccaaaacccatttgggttggcagtgtactagtcctagaacaacactgcaatgctgatgtcactacctgagtcgcttgtttgcagttgagagacatggtggaaagctttgacaccaactgataagaaccaaatcagtacagaggaaaatatagtgatcaacaaagaacagttggatgtattattcagtaggcttttactctgatcaatgtgatatagaagaagatgaaatacaatgtattagtccacagggtattcgagaaagccaaacgttctcccatgttccaaccttaatttcattccaacctcattctttccctcctactcctatttaacctccccctcccattctaactgctcctaaccaatactgaccaatgaaatacattcaattaaagatcgtaaaatcctctgtgctgtctgtttcaactggtgtacaccctttttattattgatctcctatcaatccccaaattataagtcatcgatccaaaaaaaagtccaaatattctgtggaagtttaaatcataaatgatagcaaaagtattatatgctatgaggaatgctagtaagtagaacatactattattggttgaaatttactgagactcataactcattgaataaggcataggatccataagatttcgtgaatcccaatagatttcaaacaataatatagtctgtgctagaaagagcatgtcaaaaggtatgccgctagcattttctttacactaaatttgaattttataatctgaggctaacctatcatcatttgacagaaaaccagtggattttcattttaaacttcactgacaacctcatactatggatatagcaaagttggtaaaaactaaatattgattttcctggtgatcaataattagcatatctacaactaaaatcccagtgtgtttcactcaagaacaatcgttgaattttgtccagaataataaatccttggttatatgtttaggattgttgtgagtctaaaagctcccatagaggattcagtgctaatagttacatataggtatgcaaggttccaaaatcaacggaggacaaaggattatcattacaaatggttattaaatgtgttacaaatcaaagaaacaatgtatagtttaatgtgctctcaaactactggtgatgaagaaatggaatgaggaaacttacttcatgagagtcactaatttgttgcaagtcagtgatgatataagcaattggatatatatacgcagatgaacctcctccaacgactgtaggcaatctggttccaaaaagcgtttggagaagtgtgttaatgccagctacaaaaagcagagtctgtattacccgtgccttgtcaccctggttatatcagaaccaaaacaccaacaagtaaatataagcaataaatgtgtggcgaaggcaacaattgttttacaaacaagcagaaattcagcatacatcgcttcctcccatggcatgaacaatccatgacggaatcatcacactcgttcccagcatcaatatataattttgaaatgctagtaggatagcttcagctgcaagacaaggtattcacaatgagccaataagaaagagaatgtaaaggaaattggaaacattaatatcccacctcacagtctaaattgcactgctaaagtagatcacaaaaactgaaaactcaaaattactaagagcaaatcaaaccattgattagaatacaagaaaccaagaactttatgccaaatttgtgtgtatcttgggcatagattcttttatgttaaattttcatttgaccttgttatgccaaatttttacaaaacgaaaaaatgtttgagtactaggaggttatataggcggccttaggtgggaatattagagcattagcttcacactaaagcaagtcacatagtaagaaatgcatgataatttcaggtcaatcattttggtagatatcataaaagatactatgcttagagttttaagcctatatattttcttgtaatctgagtgcattataacgagtgtatgaagaaaatatagagaataattggatgtagctcacattgggtgaagcaggataaacactgtgtgttatttttcttctctttctctctttttgttttctagattgttatgcgattgctcagtacctcacctttccccccatttctttctccgttcaccactaaaccaaacttatatctcctccccactagcatagaacttaacttgttattttaacttttaagaatttcttatcttgggtttttttttttttttttttnnnnnnnnnnnnnnnnnnnnnnnnnnnnnnnnnnnnnnnnnnnnnnnnnnnnnnnnnnnnnnnnnnnnnnnnnnnnnnnnnnnnnnnnnnnnnnnnnnnnnnnnnnnnnnnnnnnnnnnnnnnnnnnnnnnnnnnnnnnnnnnnnnnnnnnnnnnnnnnnnnnnnnnnnnnnnnnnnnnnnnnnnnnnnnnnnnnnnnnnnnnnnnnnnnnnnnnnnnnnnnnnnnnnnnnnnnnnnnnnnnnnnnnnnnnnnnnnnnnnnnnnnnnnnnnnnnnnnnnnnnnnnnnnnnnnnnnnnnnnnnnnnnnnnnnnnnnnnnnnnnnnnnnnnnnnnnnnnnnnnnnnnnnnnnnnnnnnnnnnnnnnnncggtgaaatgatcccttagtattattcttgtgagtcattatcatatgaaaatcgaaaggctttaacaactttttttttattcattcttaatttaaagttttgtcatgttgatatatgtatagagtcacgctattacgaacgacacgaataaaaagtgcatgaatttaacatgtaaggccgagattttttttaacataaaatttaatcagagtaggtgctttgtagttcgtagcaacaatttctccaacacataaggtaaaaatggtcgattctcataaattaatatgtaggaccacttattctgaatcgtacgtcattaataagtataatttgttttttcattagccaggccagaagaagtagggtaaagtggtaattacaatataatggtgatgactcatgattgcaagccttcttagaaatagtgatcacaatctcacagcgctaaaggacatgttaaaatgatgatgagaaacagaaattcaatatatctattcaaaaacccagagtgttataaattataatacacattttatgtttaaattaaaaactaacccaagtagaaaaagattaaaacagaaaagttcaagcttcaaagtcgcactctatctaaaatagcgtaaaaatctcaactttttaatccatataaccagaaacaaagtaatatagcctagtctcaaacttttggagtaacgcgttacgcgtacaaaaataacaaaccaaatggaagaaaacccagctcatgcaatggcttcaagacaaaaaaaaaaacaaaaaaacaaaaaaagctttctatcatttcatccatatgggtttgtaactaaagttggagaaactacaaaacgggcaagcttcctctttctttaattttaccccctaatgatcattaagttcaaatccaaatatttaacaagcaccctttttttgcttataaaagaaaaagcacccttgtttcgtcagatggcaacagaaaatgatgaaaaggaatagaaaaaactcttagtaataagagagaaaaacaaattagggagagagagcataccccaaggaggattagagtctaagcagcattcaaggtcctgaagctgttccatagggagatgggtaatgtctgccattgttgtagcttcagaagagaaacaaagaggtgtcgaaagaacaaaaaggaaaggatgatgaggaagaagatgaagaagaattctcaacaaagtaaagtgcaacaataaagtgaaaaaaaaaaaagcataaatatttattagtcaaataatggagagagtgaagtgtgcgtggaagtgtaacgtaacaccctcaattgtgatcgataagctagttattattttttggttttgaaattcgacgtggtttacgaaactagcccttaataaccgtgtatgaatacttgaataggaaagtgtgggggccccacaaattcccaagtgggggtcattgatattcgactatgaagtggaagtgtccttactggggaaaccagcgaagcactgtgcgtcactatggtcccctgatgggactgtacggcacccattgagatgcataataatgttggtcgaaatggtaccttttgtgagtgaataactgtttccatcgtcatcagatgcgtggaatcgttaaattttcaacttaggatttcaaaatgggcatggcaataaaaacatcaatccatgagaatttgtttgatcggaattggatttgggttttatccgactcagtatgtcggttagttctaatatgaagttcaaaagcacacatttacatatgagggagtaaaataacttgttataatttttttttttagtcgattcaatcttataaaattgatcattttggagaaagaaaaatcgaataatttttcattttttgttttttataaaaaaatataacacatttaagataaagaataatatatttttttttatttagaaaatatccaaattttgattcctaaaatgccataaatagttcgaactgtatagcaacaataatcaatttttgctcaaatggtttgtagaggaaccctaccttctctgatccattcaatacgtgcaatttcttttccgtcgatacgtcttgtaatttgtatctgaactccctttgtatccgcctgttcagttaattcaataacttttttcattgctttacgaaacgaaactctattctttaattgtccagctataaattctgcaataatattagggtgtttataagcatttgcaacttttacaatagcaatgtttagttttcgattcacacaattcagttttttttgcatattcgtctgtaattcttcgattttttaataggtttttttataggaaaaaaatagaaaagtatttaataaatttatcattttctctctcttcccgttttgtccttgccgcttcatcattctccttcttggagccatcatcttgcgttatcattggagttatttttgaaaagcgacattttgatttttttttctctttcttttccaacgacgttttgacgcccctttgtttccatcttctctctttatttgtagatttcattcaccattacagattggtgaaatcagatctccactttagacgcgaacccattcaagaaatcagatctgcatttgtttaagattccaaaggcgtggaccgaaaccagatctaataagacgaacaccatgactgctttcttttcaatcgaaagaaataataaaaagcattttttatttttttctttctcattctttcactcaacgactccgtgcaactctccctcccaaaatttgttactttttttgtgagaaatttgttggaagttaatcatctaaattcttaaattttggatttttgcagattgaatttgttggtattttctttttgttcggatgatataatagattaaaatatttgaacgaatggataaaatttgatctttggaatgagaagcaacaaaaagtggtggtggtaactgatagggatgagttgaagcattcttccatttttttatatatatgaaaattgaagaaatcaatagaaaaaatgataatttctactgttgaagagattaagttgaaaatgaaagagaaaagaaaaaaagtaaccgacagaaaacgaacgatgggtgatagggaagagttgaagagagggaagatctttagctattatcaagtcaaaaatcttgtccattaattattttattaataaatctaatgataaattttaatgtttcacccgtgaatatgtgttttaatgctttatattagaattggcctaatttatcctattatgcatatatttgtaattattaataatataattatatataattaatataattaatgtatatatacacacatatatattatgtaattctatttatatatatatatatatatatatataatttttttggtatcattgtccaagaaatcaaaaggctgttgcgtctcccagtggggtgcatgttccagtatgtgttcaaaggattcaagtttcgctgataagttagctagcagtgtcttgtccctctcgtatttgtttaagactcttccagagcctcctgtttttatttctttcttgctgcttcatgatgcagcttccttttaatattttatcattattaaaatatagaataattattttaatagttaactaaataatattataattataatactaattaaataataaaactaaaaattgtgcattaatataaaaatataattcaattcttaaatattcttacaatattgattctttattaatttttataaatattgtttgaattaaaatgtaattgataattaatctataattatttaaaatgtatgaataaataaatttttaaaaagtttgagatggatttcccaaaattgtctctaaaccccataaaagtcgataaagatagaattaggtttcatttttttttccaccttttataaatccaaacgcattcttttataattcgaaattcattctgtcttttacaagaatgggaatggaaagagtttttttagtttnnnnnnnnnnnnnnnnnnnnnnnnnnnnnnnnnnnnnnnnnnnnnnnnnnnnnnnnnnnnnnnnnnnnnnnnnnnnnnnnnnnnnnnnnnnnnnnnnnnnnnnnnnnnnnnnnnnnnnnnnnnnnnnnnnnnnnnnnnnnnnnnnnnnnnnnnnnnnnnnnnnnnnnnnnnnnnnnnnnnnnnnnnnnnnnnnnnnnnnnnnnnnnnnnnnnnnnnnnnnnnnnnnnnnnnnnnnnnnnnnnnnnnnnnnnnnnnnnnnnnnnnnnnnnnnnnnnnnnnnnnnnnnnnnnnnnnnnnnnnnnnnnnnnnnnnnnnnnnnnnnnnnnnnnnnnnnnnnnnnnnnnnnnnnnnnnnnnnnnnnnnnnnnnnnnnnnnnnnnnnnnnnnnnnnnnnnnnnnntatcattaaaattctgtttctttcttgtttttattatataaattctctctgtcttgatcttaatgtatcgaaaaagatttatatattgatagctttgttaggcatctatcaatttatatattcataaaggcatataaaattcaaatctaaattcacctttgaaattagagaggattggtgatgttactctgtattgataatttatccattatttttattattttttaaaaaaacatcataataagattaaaaaaatagtttaacatagaagatcctcgcacatcttgataaggatggtgaaggttcaattatagaattattaacgcattaggccgacaccatagtccatatatttaatacagtctatcaagatataactataatcaaccatagctcctttttttaagaggatcaaccatagctcttaacctcatcgaaaactacaaatccacacattctaacccctttgtcatatatatataaaaaatgagtccaaataaagtcgaataaaatccataaaacaataaaaacttacaaatgactatcattgtgttaatgtttcccataaccatttattagatgttacaaactaagaaaacaatgcatagttgttgctctcagattgccagtaatgaacaaatggaacgaggaaatatataattttgtaggcagtcagtgataatgtaagcaactggaagagtaaatatgttgatgaacctccaacttttgtaggcaattagttccaaaagtgttcgaagaagtgtgttaatgccagctacaaagagcagaatttgtattaccatgccttatcaccctggttatatgaccaaccaaatcacagtcaataacaagtaaatatccataaaaaatgtgtttcaaaagcaagatttgttttacacgagcagaaattaagcacacatcacttcttctcatggcatgaacaattaatgaaggaatcatgatacttgttcccagcttcaatatataattttgaaatgatggtaggatagcttcacacttcagctgcaagacaaggcattcacaatgagccaacaaagagaatgagaaggaaacattaacatcccgacacagtctaaattgcgctgcaaaagtagagcacgacaagtgaaaactcaaaactacttaaagcaaatcaaaccattgattaaaatctgtgtatcttaggcatggattttttcatgttaaattttcatttgatcttgttatgccaaattttcacataacgtgtaaaaatgtttactactagtaggttttggaggtggccttaggtgggaatagtagagcattaacatcgagttgaagcaagccaccgagtaagggatgcatgacacttttaggttgattgtgctggtaggtatcataaaaggtaacccctatgcattctctttctagctagaatgacctccattgtgcatttaatcctaaattttttaactacatatcttacacatgaatatataaaaattaggtgtaaggttatcttttatgacacctaccaggaacaaccaacccaaaattatactgattttctcatgtagtggctctcttcaacatcaatgttccactatgcccaaagcaatgaacttctcctaattacaattaactcatttggttccggcatcaagttggcttatctcatgatattctacattttctccacctccaaactcaaggtattctttatatatactcaacgattctataaggtatagacacctatgcataacttgtgtcggcatgtcaaacacttgtcaaacatgccttaagcataatagtggcgtgtcggtgagtcggtgtgtctatttgttggcatgtcaagcacttgtcaaacatgctttaagcataatgacgtgtcaatgagtcaaagtgttggtatgtaaaacacttgtcaaacatgttttgagcaaaaaatgtgtgttaatgagttagtgtgttggacactctttaaacaaatacttgtaaagcatgccttgaatacgtgtgggacatcattttacattgatgcaataattttttttaattaaatatagctagaacatgagtcaagaaagtgagttgacacttgctcttaactaaatacttataaatgactctatcatattttattttttgaagaagttaacttatattatattttaagatagtgtgaaacttgacattttgtaagactcattatagaatttaaccagttattttaacttttaaaaaatatgatacatctttttatcttggaatttttttaaagattataatgtgaaataatcccttaatattctttttgttttctttaacggcaaaatttaatattctttttgtgagtcattatcatatggataaaaaaaaaatatgagagactaaaaaaaaatttaatctaaattaagaaactaaaattatattcaagtcacaaatttgtactaacannnnnnnnnnnnnnnnnnnnnnnnnnnnnnnnnnnnnnnnnnnnnnnnnnnnnnnnnnnnnnnnnnnnnnnnnnnnnnnnnnnnnnnnnnnnnnnnnnnnnnnnnnnnnnnnnnnnnnnnnnnnnnnnnnnnnnnnnnnnnnnnnnnnnnnnnnnnnnnnnnnnnnnnnnnnnnnnnnnnnnnnnnnnnnnnnnnnnnnnnnnnnnnnnnnnnnnnnnnnnnnnnnnnnnnnnnnnnnnnnnnnnnnnnnnnnnnnnnnnnnnnnnnnnnnnnnnnnnnnnnnnnnnnnnnnnnnnnnnnnnnnnnnnnnnnnnnnnnnnnnnnnnnnnnnnnnnnnnnnnnnnnnnnnnnnnnnnnnnnnnnnnnnnnnnnnnnnnnnnnnnnnnnnnnnnnnnnnnnnnnnnnnnnnnnnnnnnnnnnnnnnnnnnnnnnnnnnnnnnnnnnnnnnnnnnnnnnnnnnnnnnnnnnnnnnnnnnnnnnnnnnnnnnnnnnnnnnnnnnnnnnnnnnnnnnnnnnnnnnnnnnnnnnnnnnnnnnnnnnnnnnnnnnnnnnnnnnnnnnnnnnnnnnnnnnnnnnnnnnnnnnnnnnnnnnnnnnnnnnnnnnnnnnnnnnnnnnnnnnnnnnnnnnnnnnnnnnnnnnnnnnnnnnnnnnnnnnnnnnnnnnnnnnnnnnnnnnnnnnnnnnnnnnnnnnnnnnnnnnnnnnnnnnnnnnnnnnnnnnnnnnnnnnnnnnnnnnnnnnnnnnnnnnnnnnnnnnnnnnnnnnnnnnnnnnnnnnnnnnnnnnnnnnnnnnnnnnnnnnnnnnnnnnnnnnnnnnnnnnnnnnnnnnnnnnnnnnnnnnnnnnnnnnnnnnnnnnnnnnnnnnnnnnnnnnnnnnnnnnnnnnnnnnnnnnnnnnnnnnnnnnnnnnnnnnnnnnnnnnnnnnnnnnnnnnnnnnnnnnnnnnnnnnnnnnnnnnnnnnnnnnnnnnnnnnnnnnnnnnnnnnnnnnnnnnnnnnnnnnnnnnnnnnnnnnnnnnnnnnnnnnnnnnnnnnnnnnnnnnnnnnnnnnnnnnnnnnnnnnnnnnnnnnnnnnnnnnnnnnnnnnnnnnnnnnnnnnnnnnnnnnnnnnnnnnnnnnnnnnnnnnnnnnnnnnnnnnnnnnnnnnnnnnnnnnnnnnnnnnnnnnnnnnnnnnnnnnnnnnnnnnnnnnnnnnnnnnnnnnnnnnnnnnnnnnnnnnnnnnnnnnnnnnnnnnnnnnnnnnnnnnnnnnnnnnnnnnnnnnnnnnnnnnnnnnnnnnnnnnnnnnnnnnnnnnnnnnnnnnnnnnnnnnnnnnnnnnnnnnnnnnnnnnnnnnnnnnnnnnnnnnnnnnnnnnnnnnnnnnnnnnnnnnnnnnnnnnnnnnnnnnnnnnnnnnnnnnnnnnnnnnnnnnnnnnnnnnnnnnnnnnnnnnnnnnnnnnnnnnnnnnnnnnnnnnnnnnnnnnnnnnnnnnnnnnnnnnnnnnnnnnnnnnnnnnnnnnnnnnnnnnnnnnnnnnnnnnnnnnnnnnnnnnnnnnnnnnnnnnnnntgcatagactatagacaaagtgtattaacaatttttttatcttatttatcaagtatataagttaaggaaatataatgagaaatttttgctgaaaaatatttaatattgatctttatgcaattaaaagtattgaagaatgtgtatttaatgcttttgaacttatgcacataagatagaaaaatatgtattaaattcatatttatttattcaacatagacaaagtgtaataacatttttttttatcttataaatcaagtatataagttaaggaaatataattagaaattttcgctgaaaatatttaatatttatctttatgtaattaaaaatattgaagtgtatttatttaatttttttgaacttatgcacataagatagaaaaatatgtattaaattcgtattatttattcaacatactatcttatacttatatttgtgcatttttaccaaaaaaatacttttattagatttggtgatggtggtgttgtatttggttgcatgggtgcaagagtgatggtgactcggtaaaggttcagggaggaggtggttgagaaaggaagaagaaggttagaaaggcatattaaaatttttggaggtgcgtcaaggaaaaattggggtgtattaggtagttgtctatattcaattgagttagcccaatttttatacaaaacttggattgaaaacaaaatatatatggacaataaaaaaaccgttatgggtccaaaatataaaaaaaggagtcttgatagttgaccacggttctcttctgtaatctttctgtttcgtattcctcaaaataataaagtttttatatgtttatatttcattataaatatttttttaaataatatgtgtattttaaaagatagataatattaatttacaattttgaataaatttaggatttaaaaaaaataaaatatacttattaaatattgtaattcattgaagtaatctattaaacattttgttgtatacaatatttttaatgtaatttgtatatttatgatcttttcattataattataataacaattattttagtgatgtggctcttgacaatataatattttttgtataaatcatattttcacaataaacaatcttatttaaatcgataggactatcatgaataataaaaaaatttccttttaaatattgatatagttgtatattcaggtttaaacttgaaatcattgnnnnnnnnnnnnnnnnnnnnnnnnnnnnnnnnnnnnnnnnnnnnnnnnnnnnnnnnnnnnnnnnnnnnnnnnnnnnnnnnnnnnnnnnnnnnnnnnnnnnnnnnnnnnnnnnnnnnnnnnnnnnnnnnnnnnnnnnnnnnnnnnnnnnnnnnnnnnnnnnnnnnnnnnnnnnnnnnnnnnnnnnnnnnnnnnnnnnnnnnnnnnnnnnnnnnnnnnnnnnnnnnnnnnnnnnnnnnnnnnnnnnnnnnnnnnnnnnnnnnnnnnnnnnnnnnnnnnnnnnnnnnnnnnnnnnnnnnnnnnnnnnnnnnnnnnnnnnnnnnnnnnnnnnnnnnnnnnnnnnnnnnnnnnnnnnnnnnnnnnnnnnnnnnnnnnnnnnnnnnnnnnnnnnnnnnnnnnnnnnnnnnnnnnnnnnnnnnnnnnnnnnnnnnnnnnnnnnnnnnnnnnnnnnnnnnnnnnnnnnnnnnnnnnnctttaatcaatttttttttaaaaaccgaaaccactttttaaaataagtttaatatttttattataaaaataaaatttttaataattttacatttaaattttgtaagatgacttataaattaattcataactaaatcaagaaaaggacatgtgattttttattgttttgaagttaattttccttcatcttgtttcaagagaaacaaaatggatggtataggggaaagaagagtaagggagcacggactctacgtaatcatgactttgatgaatgctatactcctctaacaagtgttcatattttgttctcaccaaggcatggatgtcatatatgtaaaaacactaatgctgaagttaatataagattatgagtataggtatagaggtgagaaatagagatacaatgttgtgaaattcgttggagagacattgagtggaattcgcttaagattggatttcctttgcataggaacagatcctcttctccaaattgtgaggcttcctttaaatgtatcattgtaatattaattttattttattgtgggattgatttgagaaactttgataaattaatttcttagttagagtaaaaagttgtctaagttacttagaataaaaaatgtggtgtggtgtgatattataaaaaaaatataaaatattataaaacatttagtagagaaactcattaatttctccattagagatgccctaacccctaagttcccgagactctattccaattacaagttaagaagaaaaacttcttagaaataaaagagatcaatttttcatcgtatatttgattatcatttagtgttaaaaaactgctaaagctgtgtagatgtacaagctcatgcagtttagaccctgaactcttagtaataagatacttctgagtctaaaaaattgattactcacacaagtcggctgcaactatacaagcacacaaaatccatgacaaaagcaatcttttttcttctcattggaaactgtataatgttgaagtctacaccttctggaatttctccacaattattaaaatttggattttgaaatctgtaaactaaaaaatatcgaatttcagccatgaagtttcctatttgccaaagatctcgatttggaccacttgtacatgtgatgatagggttgcattggcctacacatacacattgagttagaacttaaaaattgtgctacgaaatgcaccgactgatatatatatatatatatatatagtatctccccaagctcttcacaaagttgggtctgccccgcaattattttttaaatgtaccaacccatttaaaggcagggtcttaacgtgtggaccaattatgaaccaaaccaagttcctcaccgccactttataaacacagtgaattaatgaaggcctaatttgatgtataaactttcattcttctatggttaataaccaaagaatccctacctattttaggtttctaactagaagctaaagtacacttgcactatttaatacattaataagaaattacgaagacttagtctctgctctataaggtgacaatgaggggctggccaacttcaccctgaattggttcacatgtaagagcaagacactgtatttatttaattatatataaaggggttgggataactaaaaaataattgcgagacaggcacaaatatgaactgttttctgttttcgaagatataaaacagtcggtgagcgagtaccatagcacatttctaagttctaggctaacatgattttagcctttagacttacccaatacgaacatgatctcataacatgcatgtatttgtggtccaaaactatatgtttaccaaaaaaacgaaaacttatctgagatttcaaaattcattttttttattgtacagattttcaattcaatgcttaagccggcctggatataaaaatattaaataaattaaactacttatataaataaaagattaatttatgtgttttaatatttttagaaattctctgatctattttttttcttcaaattaaaattaaaatttataattgattttaatttataagaaatttagtccatcttccttattttctttgtttgcaagtgcatgtgtattaaaaaacgtnnnnnnnnnnnnnnnnnnnnnnnnnnnnnnnnnnnnnnnnnnnnnnnnnnnnnnnnnnnnnnnnnnnnnnnnnnnnnnnnnnnnnnnnnnnnnnnnnnnnnnnnnnnnnnnnnnnnnnnnnnnnnnnnnnnnnnnnnnnnnnnnnnnnnnnnnnnnnnnnnnnnnnnnnnnnnnnnnnnnnnnnnnnnnnnnnnnnnnnnnnnnnnnnnnnnnnnnnnnnnnnnnnnnnnnnnnnnnnnnnnnnnnnnnnnnnnnnnnnnnnnnnnnnnnnnnnnnnnnnnnnnnnnnnnnnnnnnnnnnnnnnnnnnnnnnnnnnnnnnnnnnnnnnnnnnnnnnnnnnnnnnnnnnnnnnnnnnnnnnnnnnnnnnnnnnnnnnnnnnnnnnnnnnnnnnnnnnnnnnnnnnnnnnnnnnnnnnnnnnnnnnnnnnnnnnnnnnnnnnnnnnnnnnnnnnnnnnnnnnnnnnnnnnnnnnnnnnnnnnnnnnnnnnnnnnnnnnnnnnnnnnnnnnnnnnnnnnnnnnnnnnnnnnnnnnnnnnnnnnnnnnnnnnnnnnnnnnnnnnnnnnnnnnnnnnnnnnnnnnnnnnaaaatcagtatcttattattatacaagaaaacaattagtattttaatttttatcatgcttggtaatgtgtgtgtgcaactgacttgttatcagtcaagtctcgtgcactaaactagtaacttaatttatttattcagtgtaaattaagtctccatattaagacttaagttacgccatttacatgtagttgagatggtccgaaatctatagtaacttaatttatttgttcagtggaaagtctccatatcaagaaacttagacgtagttgagatgaccaaaacagaatgtagttcatatcagaacagctgtcaccagtaataaggggataattacgtaaagaatattgtcatgatcaatggtgaaagcttaagggtttatttatggttacgtagtttatatcttgcactatttaatacattaataagaaattgtattaatttaagtatgaaaacaaatgagaaaatgtatttgtgttattttaaaaaaaaaatataataagataaagaaattttccttgttacataataagataaagaatgtaataaataattaaaaaatattaagttaatagaccttttcaactttaagttcctttcgcaatattggttattttacatttataatcaggtgttttttatccaataattcactccatttctcagattctagctagttaaaagtttttttatttctactttttctctaaaatatttaaaaaccaggatttttcttgaatacgtttgattagtttacattattaatgactatatatatgttgtttggctacgaaattttattagttatttgatgtatgctttatttgtatgtttatcatattttgaaatttagttcattattaacaagtaaaaactcacaaaagaaaaataaaagaaatcacaattcccatttttttttctagatttgttagttatttttctgttttatagttattttttcatttttattttttaaataattggtttgtaggccaacctatttaatcggaagctatactgcttatgcaagacagatgcaagaccaaaaatgaagtccatttttttcagttgaattagcttgttaaaaatgagagtcaataatgcagacaaacttcgaacttaatttaaacaggttgaaatgacccctttacataactctatgggagagtagagactaaggccacggttagtacacgtattttcatattttcgtatctatcatttaactctagctaatttaatttctttactaaaaaagaatccaaatatttaatcataaacaataatattattaaaagcatataattatatatgaagattttttttgggtagagaattatgtatgaagattaaagaagcacgcacttataattttaattaacaatattgtattttttgttatcatatgaaccggtcagtagctaatatataatttaattagattttaatccaacactaaatttaattaaacaaaactcaataatactttttaattaagatattattatatgtataattataatgatgatcggcatattttcccacaaaaatagattacctgagtacttgtgcaaaaataactgatggcgtggggggacaattctaaattctaataacctcttgatttctttatactgatggaaacttttttttttttttccagtaactacataaaacaagcataaggaaaacatataaaaaataggacacagattatgatggaaaagtaaatttcttatgtttggtggtcaaagaaagataatcaaatatggtaagtgttttaggtatattttattatttttcattctttgttcctctgcttttttcactctcaatttcaactctatgaaattgaaacattcacaccaccatgatcaagaagcaaaagcttcaagcttccaaccccaaaccatcgaagtcagatcacactcacagtcaaacaaccaaaattccagtccctttcaagcatcttccttcgaatgacaccaatctgttcgaccctatttttgtgatctgatgtgtttctccttttcatgttcatcccattgttcccagaaaggctcctagatcatcaaagattaggttcacggtggctagtcgtggcggaggcgaatggtcgtcgtctttaatatcagcagcgtccactcttggccttcgaaattcataagggatccctttagtaatggcacaatagtaattctatataaataattaaaataatgataatataaagaattataaatacaggaaatacttacggcaatcggttacattttctatgtgcatcatatacacaaaatatttgtccagcctgtacaaaaaaacaaaaacaatataatgatttagtatacagacaactataaattttatttacagttatttaaacacaaattaataataaaataaatttgtttatttttaataattatctaaaaaattatatctatcctaaattccagactagttaatagtgtaatctcttttgtattaacaaaatgtataaattaaactcgtgatttattaggtcatgaaataatcaacagaccggtgctgtgcatgtcatgatctggggaagaaaaaaagacccgattctaagaaaactgaatttgtcacgttttctttgtaagtcttcttcagttcttctactcaaaatgtgatgcgacacgtgatgtttaatgggctgatgcaaacaaaacattcgaaggaacaatgacagcagcgtgggtttgagatttggatcttgcatcatggaatatattttgtcggtgcaggtcaagaagcaaaattaactatcgtatgaagaatatatcatatatgtaatttccgtaactcagtcctgtcttaatcaaggtgaagtgaaatctttcagcttagttgggtgtttttttggtaaagggaaagacaagaaaaatgttagtacaaggaacaggtttaaatgtgcattggtaaaggattagatacatttggtggatctaaaactttgttttaatacaaacaattgaaaataatagatttaaatatataaaattaaagagtataaaatatgaaaatataaaaatatgagaacagtgaattcattaaatatataaaattataggagacaaaatataaaatattagataattacatgtaattttttaaaatgaggaggtatatgtacacaccttcgctataatatagatccgtcattgtttaaataggtaagatttttcatgagtttcttattattattatatataaagagtacataatatgagactcttatgcggtcaaataaaatatgatgataaatgggaattttaaacctagaatattaaatattatttgaatggttatattaagataaaattaaattttaatgtcttatctatattgtttcagtttcatcacttatataattttaaaaaaaaaatactttgaatctttaaaaaatttctataataataaattagttattttagtattttatcatactaatttggttatcttaaaagacacatgataaactataaaaaaaaaatgtcacattaaaaaatgggtgattcaagtaagnnnnnnnnnnnnnnnnnnnnnnnnnnnnnnnnnnnnnnnnnnnnnnnnnnnnnnnnnnnnnnnnnnnnnnnnnnnnnnnnnnnnnnnnnnnnnnnnnnnnnnnnnnnnnnnnnnnnnnnnnnnnnnnnnnnnnnnnnnnnnnnnnnnnnnnnnnnnnnnnnnnnnnnnnnnnnnnnnnnnnnnnnnnnnnnnnnnnnnnnnnnnnnnnnnnnnnnnnnnnnnnnnnnnnnnnnnnnnnnnnnnnnnnnnnnnnnnnnnnnnnnnnnnnnnnnnnnnnnnnnnnnnnnnnnnnnnnnnnnnnnnnnnnnnnnnnnnnnnnnnnnnnnnnnnnnnnnnnnnnnnnnnnnnnnnnnnnnnnnnnnnnnnnnnnnnnnnnnnnnnnnnnnnnnnnnnnnnnnnnnnnnnnnnnnnnnnnnnnnnnnnnnnnnnnnnnnnnnnnnnnnnnnnnnnnnnnnnnnnnnnnnnnnnnnnnnnnnnnnnnnnnnnnnnnnnnnnnnnnnnnnnnnnnnnnnnnnnnnnnnnnnnnnnnnnnnnnnnnnnnnnnnnnnnnnnnnnnnnnnnnnnnnnnnnnnnnnnnnnnnnnnnnnnnnnnnnnnnnnnnnnnnnnnnnnnnnnnnnnnnnnnnnnnnnnnnnnnnnnnnnnnnnnnnnnnnnnnnnnnnnnnnnnnnnnnnnnnnnnnnnnnnnnnnnnnnnnnnnnnnnnnnnnnnnnnnnnnnnnnnnnnnnnnnnnnnnnnnnnnnnnnnnnnnnnnnnnnnnnnnnnnnnnnnnnnnnnnnnnnnnnnnnnnnnnnnnnnnnnnnnnnnnnnnnnnnnnnnnnnnnnnnnnnnnnnnnnnnnnnnnnnnnnnnnnnnnnnnnnnnnnnnnnnnnnnnnnnnnnnnnnnnnnnnnnnnnnnnnnnnnnnnnnnnnnnnnnnnnnnnnnnnnnnnnnnnnnnnnnnnnnnnnnnnnnnnnnnnnnnnnnnnnnnnnnnnnnnnnnnnnnnnnnnnnnnnnnnnnnnnnnnnnnnnnnnnnnnnnnnnnnnnnnnnnnnnnnnnnnnnnnnnnnnnnnnnnnnnnnnnnnnnnnnnnnnnnnnnnnnnnnnnnnnnnnnnnnnnnnnnnnnnnnnnnnnnnnnnnnnnnnnnnnnnnnnnnnnnnnnnnnnnnnnnnnnnnnnnnnnnnnnnnnnnnnnnnnnnnnnnnnnnnnnnnnnnnnnnnnnnnnnnnnnnnnnnnnnnnnnnnnnnnnnnnnnnnnnnnnnnnnnnnnnnnnnnnnnnnnnnnnnnnnnnnnnnnnnnnnnnnnnnnnnnnnnnnnnnnnnnnnnnnnnnnnnnnnnnnnnnnnnnnnnnnnnnnnnnnnnnnnnnnnnnnnnnnnnnnnnnnnnnnnnnnnnnnnnnnnnnnnnnnnnnnnnnnnnnnnnnnnnnnnnnnnnnnnnnnnnnnnnnnnnnnnnnnnnnnnnnnnnnnnnnnnnnnnnnnnnnnnnnnnnnnnnnnnnnnnnnnnnnnnnnnnnnnnnnnnnnnnnnnnnnnnnnnnnnnnnnnnnnnnnnnnnnnnnnnnnnnnnnnnnnnnnnnnnnnnnnnnnnnnnnnnnnnnnnnnnnnnnnnnnnnnnnnnnnnnnnnnnnnnnnnnnnnnnnnnnnnnnnnnnnnnnnnnnnnnnnnnnnnnnnnnnnnnnnnnnnnnnnnnnnnnnnnnnnnnnnnnnnnnnnnnnnnnnnnnnnnnnnnnnnnnnnnnnnnnnnnnnnnnnnnnnnnnnnnnnnnnnnnnnnnnnnnnnnnnnnnnnnnnnnnnnnnnnnnnnnnnnnnnnnnnnnnnnnnnnnnnnnnnnnnnnnnnnnnnnnnnnnnnnnnnnnnnnnnnnnnnnnnnnnnnnnnnnnnnnnnnnnnnnnnnnnnnnnnnnnnnnnnnnnnnnnnnnnnnnnnnnnnnnnnnnnnnnnnnnnnnnnnnnnnnnnnnnnnnnnnnnnnnnnnnnnnnnnnnnnnnnnnnnnnnnnnnnnnnnnnnnnnnnnnnnnnnnnnnnnnnnnnnnnnnnnnnnnnnnnnnnnnnnnnnnnnnnnnnnnacatccttcaattaattgagattctattttaatgtctcttttttattcttgatatcaaattctattaaaggaattttttaaaattaaatgtaattaatagattttaataatattaattaactttctcaattaacataaatattcattaattttatttatatttaaatatggaggaattacaggattctatctagattttctccatattaaaatctttcgaaacttactctgttaatttgtacaccaggggtaatgctgttgacttactagttttattttcaggaacataacctttgaaatgcaattattatgttactttttaccaattcgagagtaattattatgtttctcgtgctgttacccctaatcttgagttgattggtgtaattaagaatcatcatgagcttcgtgtttgttcctagacattttatgcgcgctcattcttatctttcctttcggattacgcgggaatacattggatttaactttattttttttattaatgaaaatttcagttgttaatatttgttcttccgttctcaaactatagtattagtagatggtcaaagctagtgtatcctcattaaaaaaatattaattgatagaatatatttttgattaaaatattcttatttaatcttgttactaaaaccaccattagtaattaatatttcaatagtaaagagtctagagactatatatgctagatggacattcttattgatgaatgattagtgttatcggcttggatacatgtgcctatcttagacagcaataaaaatttaatgcatgactaattgtaaacaaagatataattgaaaaaaaagttgtaaatttaatcttagattcataaaatatcaatagttttaaaataatactaaaatgctaaaatgtctatagtttaggaacgaaaaaatcattaagtattattttaaactacttcctccatctcatatttttagttgtttaattaaggttaatgcccataaaattaagaaatacttaataaagtaaaatattgttatatttttttactaaaatattcttatttaatactatcttatctttgatacttacattactagcagtgagtagtattagataagagtatactagtatttgagggaaaaaaattagactttgaaatttcaaaacagtaaattattttgaaaaagaaaaatagaaagttaaaacaactaaattcataaactctaaaatcaattgagttaatctaataatttttatgagagttttttaagagacatatatttaagacaatggcttacattctaacaccaaaaacaatcttgggaataactccttcattcaaatctgatcaaaatataccctttatctctctaatgaattggatagacaactcattatctttttatttttatttttatgaatagacaactcattatctttttatttttatttttatgaatagacaactcattatctaatcttgcttgtaaataaaatcactcattacctaataaccatttatcaaatgacttcaaaaatcaatcttctcccacactcgaacacctcctagtgaaacaaattaatatccttccactacaatgaagttgatctaaagtagtcaccatccaactatatgcaatttaatatgcatatacaactttgagagcttcaagccacaatcctttttttattcaaccaaaaattgccaccttttttttccaattaagttttaaattgaaccaagagagatttttaaacctaagaccacccttgcactcttttttatacacatcttcacttttaacccaagaaattttcctctttgttctaccctgtagaattttttagctatacaattttttaaaaaacttgcactggtacgtaattttaaaaaaggacaaaaaaatagagataagataatttaacattaacatagatataactattcatctgttgatggacttactaacaataaataatggaaggactaacttggtgagaaaatataattttatagattttttttgtaatttttgtctttcaaaaactaactcgttagcacctcagtttcaaagacaaatttaataatttactctcaaatttttcttataatgtagattgaaaaaccaaaagaaaataactggttaatattttagtgattgcaataattactacaatatcgttatagactatagttaaagttgcttgtgattttgttcctctctccttagttgttgtatcgtattgcagacgaaataaaggtgcgcaaaaagatggggcagagttctcatagactcatactcatgtagaaacatagtgtataacagaaactaacatggttataatcattatcatatcattagtgaacccttgccgatcatatatatataaaaaatcgagcaaaagaaaaaaagagggaagagctagaggaccaacatatattaataatgattaaataacatattgtatgtggatgaaacttgcgtcgcacacattatgggcacgcgcaccataacctccttgcttcttccaaaataatttttataataaccaggatttgtaaaaaaaaaaaaannnnnnnnnnnnnnnnnnnnnnnnnnnnnnnnnnnnnnnnnnnnnnnnnnnnnnnnnnnnnnnnnnnnnnnnnnnnnnnnnnnnnnnnnnnnnnnnnnnnnnnnnnnnnnnnnnnnnnnnnnnnnnnnnnnnnnnnnnnnnnnnnnnnnnnnnnnnnnnnnnnnnnnnnnnnnnnnnnnnnnnnnnnnnnnnnnnnnnnnnnnnnnnnnnnnnnnnnnnnnnnnnnnnnnnnnnnnnnnnnnnnnnnnnnnnnnnnnnnnnnnnnnnnnnnnnnnnnnnnnnnnnnnnnnnnnnnnnnnnnnnnnnnnnnnnnnnnnnnnnnnnnnnnnnnnnnnnnnnnnnnnnnnnnnnnnnnnnnnnnnnnnnnnnnnnnnnnnnnnnnnnnnnnnnnnnnnnnnnnnnnnnnnnnnnnnnnnnnnnnnnnnnnnnnnnnnnnnnnnnnnnnnnnnnnnnnnnnnnnnnnnnnnnnnnnnnnnnnnnnnnnnnnnnnnnnnnnnnnnnnnnnnnnnnnnnnnnnnnnnnnnnnnnnnnnnnnnnnnnnnnnnnnnnnnnnnnnnnnnnnnnnnnnnnnnnnnnnnnnnnnnnnnnnnnnnnnnnnnnnnnnnnnnnnnnnnnnnnnnnnnnnnnnnnnnnnnnnnnnnnnnnnnnnnnnnnnnnnnnnnnnnnnnnnnnnnnnnnnnnnnnnnnnnnnnnnnnnnnnnnnnnnnnnnnnnnnnnnnnnnnnnnnnnnnnnnnnnnnnnnnnnnnnnnnnnnnnnnnnnnnnnnnnnnnnnnnnnnnnnnnnnnnnnnnnnnnnnnnnnnnnnnnnnnnnnnnnnnnnnnnnnnnnnnnnnnnnnnnnnnnnnnnnnnnnnnnnnnnnnnnnnnnnnnnnnnnnnnnnnnnnnnnnnnnnnnnnnnnnnnnnnnnnnnnnnnnnnnnnnnnnnnnnnnnnnnnnnnnnnnnnnnnnnnnnnnnnnnnnnnnnnnnnnnnnnnnnnnnnnnnnnnnnnnnnnnnnnnnnnnnnnnnnnnnnnnnnnnnnnnnnnnnnnnnnnnnnnnnnnnnnnnnnnnnnnnnnnnnnnnnnnnnnnnnnnnnnnnnnnnnnnnnnnnnnnnnnnnnnnnnnnnnnnnnnnnnnnnnnnnnnnnnnnnnnnnnnnnnnnnnnnnnnnnnnnnnnnnnnnnnnnnnnnnnnnnnnnnnnnnnnnnnnnnnnnnnnnnnnnnnnnnnnnnnnnnnnnnnnnnnnnnnnnnnnnnnnnnnnnnnnnnnnnnnnnnnnnnnnnnnnnnnnnnnnnnnnnnnnnnnnnnnnnnnnnnnnnnnnnnnnnnnnnnnnnnnnnnnnnnnnnnnnnnnnnnnnnnnnnnnnnnnnnnnnnnnnnnnnnnnnnnnnnnnnnnnnnnnnnnnnnnnnnnnnnnnnnnnnnnnnnnnnnnnnnnnnnnnnnnnnnnnnnnnnnnnnnnnnnnnnnnnnnnnnnnnnnnnnnnnnnnnnnnnnnnnnnnnnnnnnnnnnnnnnnnnnnnnnnnnnnnnnnnnnnnnnnnnnnnnnnnnnnnnnnnnnnnnnnnnnnnnnnnnnnnnnnnnnnnnnnnnnnnnnnnnnnnnnnnnnnnnnnnnnnnnnnnnnnnnnnnnnnnnnnnnnnnnnnnnnnnnnnnnnnnnnnnnccgtgatggccatgtgatgctgatgaatctgtgaacagggtaatgagaataccttgatacctgtgtatgtacatattgtatctgtttgatgatatgatttgagagccatgaaggccagtttatgaaatgtcaattttgatatattatgcatgttagtgaaccagggggaggaaagacctccaaggaccctgagtttactgagattttatctcaccccgtgtgtggggattatgttgcaggtgagacgcagggagaagctgagagatcccagggcaagaggcccatgcagggatagattacatgtataaaccctaggcatagttgatgagagcatgttggctccattcttttgttacttatgcctattgctttgtggttttgtaccctgaggggattatatgtacatttgtgtacagaggatgtattttctttgttacttcaccatgtatgatgtacaactgatgttataatgacgtcatattttgttttgcttccaaactaaattgtttattttgaaaatttctgcgcaaatggatataatggaatgtnnnnnnnnnnnnnnnnnnnnnnnnnnnnnnnnnnnnnnnnnnnnnnnnnnnnnnnnnnnnnnnnnnnnnnnnnnnnnnnnnnnnnnnnnnnnnnnnnnnnnnnnnnnnnnnnnnnnnnnnnnnnnnnatggctgctaataggcagacgaatgaggccttgttgaaggctaatgaggaattgatggcagagttgagatctctgcggagagaggatcgagtaccttctccatcacctgcttatgagggcgaaggtagtcgccaccagggtggaggtagccgtcgttctgatgggcctagccaccatagaggggaccggttgtcccaatctgaggttgatgaggatacagctgctagagggaagatgcttattgctttccgcaagcatgatcctccagtgtttcatggagagtatgatcccattgctgctgttagatggctgcaggccttagagaagatcttcactgtgatggagtgcccagaccatcagagacttctctatgccacttacatgctgcagggagatgctcatgagtggtgggttaccacttcagagttgatgagaggccagggtgaggctgttacctggcaggcttttgaggctcagctcttggacagatatttccccagagatgccagagagcagaagcaggccgagttcgagggccttgtccagggacagatgtcagtagatgcgtatttggccaagtttaatgaattggctaaatatgctcatttcaggagggctctacctgattctgaggtacttgcagctaagttccagagaggacttagagagagtattgaggagaagatagctggtagcgggtccagagatctgggcagtctagtgagacagtgccggcaggttgaggacatgatcaggaggcgcagtggtagccagcctacttttcatgtgagacaggagatgaggagacccagtggtccaggcccatctatgaagggcaagggcaaagacttgagagtatcttctccagcagacagattcaagaagggctccagtcagagaaaagtgacacagagaccagattcacgccctaagtgttcgacttgtgggaagaatcattggggagtgtgttccactggtcagcttgtgtgctacagatgtggcaagcatggccactatgctagagagtgtccacaggcaggcggccgggctatagctgctcctgtgatttcagtggcacctactgcaggccgggtttatacagtggatgctagggaggcagccaaagctcctgatttgatcagaggtactattctgattgatgtatttgatgtgagggtcttgtttgactctggagctactcattcttttgttagtgagcgcactgccttaggactgaacatgcctatgttcagacttccttctcctatggaggttaccaccgcctccagagagcagtgtagagtggatatgtgctgcagagatgtgcattttcagtttgagggcagggagtatagtgttgatctgtattgccttgcaatgcctacccttgagattattttgggtatggattggttggccaagtatggcattatgctagattgctgctataagaaggttgtagtgccttcagatggaatcagctcgagttccacatcgtttctcttagtcttgcaggttcgcaaggaactgaagggaggagctcagggctatcttttgctgagtgcagcagaggagaggcagggggtggatatgtcagagattccggtggtaagtgagtttgttgatgtattcccagatgagattacacagcttccgccggatagggggattgagttctccattgacttggttccaggtgtgggacccatatccatagctccttaccgcatatctcctttagagttaaaggagctgaaggtgcagattgaggacttgttgtccaaagagtttattagaccgagtgtgtcaccgtggggagcaccggttctttttgtgaagaagaaggatgggagtatgagattatgtgtggattacaggcagctgaataaggttactattaagaataagtatcctttgcctagaattgatgatttgcttgatcagttgaggggagcctgtgtgttctccaagatagacctgcgatccggatatcaccagattcggattaagcccgaggacataccgaagactgcctttaggtcgaggtatggtcattatgagtatcaggtcattccttttggtttgacgaatgccccggcagtgttcatggattatatgaacagggtgttcagaccgtacttggatcagtttgtggtggtgtttattgatgacatactgatctactccaggacggagacagaacatgccgagcacctcaggattgttctttagacattgaggaatgatcagttgtatgctaaattgtcgaagtgtgagttttggctatcagaggtgaagttccttggtcatgtgatttctgcagctggggtagcagttgatcccagtaagattgaggctgtaatgtcttgggagaggcccgagaatgtttctgagatccgtagttttcttggtttagcaggttactaccggaggttcattcaggggttctcacagatggtgttacctttgacccgccttaccaggaaaggtagcccatttgtttggactcatgaatgtgaggagtgtttcctgagactgaaggaaaagttgaccacagctcccgtattgactcttcctgatcctgagggttgttttgaggtttattgtgatgcttccaagcagggacttggatgtgtgctaatgcaggaaaagagagtggttgcttatgcatccaggcagctgaagccacatgaggagaattatcctacacatgatttagagcttgcagctattgtctttgctctaaaggtgtggaggcattacttgtatggtgctaagttggtggtattcagtgaccacaagagtctcaaatatctctttgatcagaaggagttgaatatgagacagagacgatggatggaattcctcaaagattatgactttgagttgaaataccatccaggcaaggcgaatgttgttgctgatgccttgagcaggaaacatgtgagtgttgcctgtatgatgatctctgactgtgagttgattgagcagtttagagatatgcacctgactgtgacagagggtgctagtggtctcgagttgagagagatcagagttgataatgaattgattcagaggatccgagaggctcagaagcaggatgatactgtgagagacatgcttggtcagcaggatgtttcttgggagactcatgacttggtgatgtaccaagatcggatcgttgtgcctaagggtgagctggtagatgcagttctgtctgaggctcataagggccagtttagcattcatccaggagctaccaagatgtatcaggacctcaggactggtggccagggatgaagagagacatagctgagtatgtgtctaaatgtctggtatgtcagaaggtgaagattgagcatcagagaccgtcaggtttgctacagcctttacagattcctgagtggaaatgggatagcatttccatggattttgtgattgggctaccgaggactcagactggatgtgattccatctgggtgattgttgatagactgaccaagtctgctcatttcttacctgtcaggactgactatactgcagagagattggctcagctatatgtcagagaaattgtcagactgcatggtgttcctgagagtattatcagtgatagagatccgaagttcacttctagattttggagtgcacttcaggaggcttttgggactcagctgaggcttagtacagcttaccacccacagacggatggtcagacagagaggactatccagaccctggaggatatgttgagagcttgtgctttggagcagggcactagatgggatagatatctacctctggtggagttctcgtacaataatagttttcatgctagtttgggcatggcatcgtatgaggcactgtatggccggaggtgcaggactcctgtttgttggacagaggtaggtgagagacagcttcttggacctgagatggttcaggagactactgagcagatccgtttgatcagagataagttgttgaaagctcagagtcgacagaagagttattatgatcacaaacacaggccgttgcagtttgatgagggcgaccatgtgtttctgaggctgtctccagtcactggtgttggacgggcattgggtgtgaggaagcttagtcctagattcattggtccttaccagattctccagagggtagggccagtggcttacaggctagctttgcctccccaattgtcagggctgcatgatgtgttccacgtgtctcagttgaggaagtatgtgtcagatccttcgcacgtggtgaagcctgacactgtgcagattagagagaatctgacctgtcctacacgaccagtgcgaatccttgaccgcacagagaagcagatcagaagtaagaccatttccctagttaaagttcagtgggatggcaggacacctgaggaggcgacttgggaacgagagcaggagctgttgcagctatatcccgagttgattaccaggtatgatcttgaattttgcggtcaaaattcttaaaaaggggggttgaatataataaccaggatttgtaaaaaaaaaaaaaaaaaaaaaaaaaaaaaaaaaaatttgggcctgtgaatagtgccacgctattagcgtgagatgcggcgccgttagcgtgggagacgcgcttaagtggcgcggttagcgcgggttatggcgcggttagcgtgggaatgctccagaaagccatttcttgcgcattcttggcgcggatagcgtgggggatggcgctgttagcgtggaaacgcgggcaggggcctataaaaggccatttttacggatttttgggccaaaactcaaattttcttcttccccgcgcctctttcagccattaacgaccagagaagcttcatatcttctccatacttcatctaaacactttctacccaactaggaaagtgattagaacctcgagatgagctagatcctagtttcaatatcttgaaaagatagcctattggagaaatcccgttctctagggaaaatcctcagagcttggatttttagaagaaagaagtcgttttagaggcgttcaagcttggaaaagctatcctctgaccttcctcaacagtctagaggtaagaaactcgatctttaaccgattgaattgtggaaatgactctggatgagttctgatgaattttgggataaataagtaagttagggtcgaaactaggcttggactctttagagatatatgctcaggaggctgtttagatgaatgttgagctttgaatcttgagtattaataaagtttagttttgactctgacatctgtgtgagtaggaagattgatgatataatgatgagtttgagcctaggtacttttacaaaagatgttcaggaggctaaataaacggtgaatatgtgttgaaatagccgttctgataaacttgtcaagtatggatatttggcctggttaaggcaaatgaatcctttgaattggctcatacagagtcttgtaggaactctagtgcgttgaataggccgagatagatcctgttgagggtctgtgaatcgcctttgaggtgattagtcctaataaccttaagatagaacagagaggtttaataaaaaggattagctttgttttatcattctaacggttgaggaccgttattgatgtttacatgctcttgtgtagggcgtgattctgacatcactagtgattgtgaccacgaagccgggagagccggtgtagcgctgagagcaggtaagctccttgttcttgggagtgattcctttcctttgtgttccaccatactccgaggaagtattggttgttgaataacatgttgcatgaatattgaaattgaatgttactgattgtgaatgaagcatgtatatatacatatatgtgtagatatctgagtaaatgatatactgtgggcgattgagatgatgttgaatgagatatacactaggtacacgtgttagtgataacctctatgaggtatatgcggtgatagtatcttgtgtttgtagagaattctctggccagtagaatgggttagatatggacttcccttagagccaaagttatatggaacaactctaagtgatcaataagtaatgtgtgataaaacctgagagtatgcgcatgattgcagatgagcatctcttggaagtgtcatatatgtccgaggttgttctgagataaagtacctgattgcagatgagcttttctcaggaagtataatatagatatatgtgtgattaaatccttagagaaggtacctgattgcagatgagcgttctcaaggaatatgatatatctatatctatatctctatatatatatgttgctgtatctgaatagggatatctatgtgatatgtggtgagcaaatgaaagccatgatggctgactaggggtgattatcccttaagttatatatatttatacattttgtctctgtgtgatgaaatgtgatgtgagccgtgatggccatgtgatgctgatgaatctgtgaacagggtaatgagaataccttgatacctgtgtatgtacatattgtatctgtttgatgatatgatttgagagccatgaaggccagtttatgaaatgtcaattttgatatattatgcatgttagtgaaccagggggaggaaagacctccaaggaccctgagtttactgagattttatctcaccccgtgtgtggggattatgttgcaggtgagacgcagggagaagctgagagatcccagggcaagaggcccatgcagggatagattacatgtataaaccctaggcatagttgatgagagcatgttggctccattcttttgttacttatgcctattgctttgtggttttgtaccctgaggggattatatgtacatttgtgtacagaggatgtattttctttgttacttcaccatgtatgatgtacaactgatgttataatgacgtcatattttgttttgcttccaaactaaattgtttattttgaaaatttctgcgcaaatggatataatggaatgttaacaaaccggatgcatacggggcgttacaattttcaaacttctagtttttgcctgaaccaaggcctgctaaacgttatctcttaatggcaggcaaatcgcttttgatataagaaattgaccaactttagccataaaagaaccattttttgctcagcttaaaatttgtgcacattggcatgtgttagctatttacaaagataagaaatagaccaccctctgcatgcacaatgcaacatttatggagcctacttagcaaccctgaattccttagcttggcattctccaagactccaattcgtttacgagttttctaatttacaacttccatgctgtgcaaaatacagccatgcatatcacaaatatgccatttagatagttatataatacctgttctacaagaaatttaaatttaaaataaaaataatgtaggcactaaaattcccattaaagatgtgtgatcaggtgagagagatggatcctctcaacggatcttttgtatataataataaatccacaatactttttttttcaattttattttaaaagttaattgcaaatttaatttttttaagaatttaaggattttttttatttttttttttattttctgaaaataatcttctaccgaaagcaagtcgtagagatttaaacaattcaaactctgtggagttggtacaagtaacgacaggtttgtgtaaattcgatttatcatgacaaaataaaacaaagagaattgaataattcatttattattattagagatgcatccattaatgccattaattacaacattgaataatcaaaataattttttatttatttcatgtctttgaatttgttatgtagaaatattaaataaatacattttacatttaatatattaaaaacgcaaataacgtgtagtatttataagtaatataatatatttaataaatgtattgaatgcttttgacctgtaccttgaacacttttaccccgttattaaagattgaataataaaacttctgagaatatattagttaaaaaatgctaaaatttgaaataaaattttatgaatttatttagcatgtagtgataataattttttacactatcatctattaataaattatcaaatataacaaatttgttactttttattatgaatatttaaaagttacacatgaaatgatttttttttattgattgagagtacataaaacacaatatttattatataaaagaaatatgtaatatttctttaaataattaaaattatttaatagaaactattaaataagagaaattaatcttttgacttaatagcatcatattttaattatattattattattattattactgctgttgttgtaacttatttgaaactgatgaaaagagttgcaagctacacatgcaaggttcctgcaataagtcacaagtaaaaaacggttcttgtaataaatggagagaataggtgccttgaaatcacagtggaattttaacaagagtcaacatagcagggtgttttccttatttgccacacagatggacatccaagtgatgcaaaattcacccttgtgtgcaagaaaacaagtaaaagtggtggtgtgagtttcacgttctaattttgtggggctctcccccaaaatgatccctgcctattttagatacatcgtaggcacatctcaggcttttaaaagacaattcaaacccttcacttgtggtggtgtggtgagacttcacttctttttttttctttttttcttccaatttcccttcactcctaaaaacttttttaggagggaagggggggcaatggaaccacataagaaacaccattttggaacctccaacatccccatgctagtacaacattgttgtcttattatcttcttcatcttcaccttcttcactaccaccaccacccaagcttttgattatgctgatgccctttcaaagagtcttctctactttgaagcacaacgctctgggaggataccctataatcagcgtgtcacttggcgtgaccattctggcctcactgatggcctagaagaaggggtaggtccaaattctcaataatacccacatgacccaactcatcaaattcttgtcttttactctcttggcatgccaattctctttcaaaatcaaaactttttttttctctctttttggtttgtgtaggtggacttggtgggagggtattatgatgcaggggatcatgtgaaattcggtttaccaatggcattcacgatcacaatgctctcatggagtgccatagagtataggcaacaaattgaagatgcaggtgaactagaacacgcattggaggcaatcaaatggggcactgattatttcatcaaagctcacactagcccaaatgtcctatgggctgaggtacactaactacaagaaatttcaagagttttaattggtgttcttctcgagaaggcctttctcaatgtgtccaaattctttccactattagtattgaattaaaaaattaagtgtaccaaaaacttagatttctctgctaccatagcaattttctaattcaatcaatccaattcattattctcactgttttaattacttagaggcattggttgaagagattgaatggaattctaaaattaatgagatactttttttttccaggtgggtgatggtgacactgaccattattgttggcaacgcccagaggacatgacaacttcacggcgagcatttaagatagataagaagaatcctggttcagatctggccggagagactgcagcagccatggcagctgcttccgttgtgttcaggaaaaccaacccacattactctcacttgcttctacaccatgccctgcaggtgagtcattagccaatgctttgtgtcctaattaaaagtgtgattgattgtgctttttttattggctttgacaagctgcatgattaataataattgtctgtagtagcaacttttgtgtgacaatctcaatttcaaaactaataattaggctgactgagattttatttgaaaagtatatgagaaattaaggctaattaataggctttgttaagatattgattaagaaactaataaatagaaaaattttaaattaagattacactgttagagatcacaattgaatggactattacactttctaatgtttttttcttcttctttaatggtgttttgtctttaggacatttattagcatttttgaggaagtattgttgaaatgaaaacatttattgtgtgtgtttttgtagttgtttgagttcggggacaagtataggggaaattatgatgctagtgtgggagtggtaaagagctactatgcgtcggtgagtggatacatggatgagttgttgtgggctgccacgtggctgtacaaggccaccgacaacaaaatgtatcttgagtacgttatttccaatgcgcatgcctttggtggcactggttggtccatttcagaattcagctgggacgttaagcatgctggtcttcaactcatgctctctaaggttacctttagtgtgttttcattttatttaggtttcattgtttcaaactcctttgattttttttcttctcccatgtgagtgtggctctttaatatctatccaactttatctagattttgcttttctaacatgaaaatgatggtgggttaaatcttagtactttattttaaaggtcattcatggagtatgcacgaattaaggtatattaatatactagtattattatctaggggtattaaagacacaagaattaaaaagtgtacccaagcacaaggccatgtgcagttagtgctttagctttgcaacacagcgcagttaaagtggtatggcttatggttgagccgaatgttatagacgtgaagcttgagagccttaaacacctcagtacactctccctccctttttttccccttttaacaaatattagcaaataaattatgaggtagggcagcctttcgtcggctaacatttttagaaactaatttaggtcactatgcattttgttaggaattaatcatatgttaaaaatggaagaaaaaaaagatagaatgttaaagtgtttcacatttataatattgaaaaattaaatgtttatatactttgaaggagtgtcagtaatgtttttttgctaatattttttcaacacatttttcttattggttgaaaatcatgtgagtttcattattttgagaatgagaccatggagaatgagactcatattttgtagtgagtcttacatatgtgtattgcattataatgtcacgtcagtgtttctgttaaaatattaatgttaagttaatagatgaacttttcatgaaaaaaaatagatgatctaaaactacgtatcaaattcataaaaagaaaaaaagttgagggatggaatttgtgagtttagaaggatctaagttcatttttaaaaaatccgaagttttttttttttggttagattaaacccaaagtttacatacgatacttttgagttttgacgcacctttttttggggttgttcatattaaaactgcccttcaaaatatttaatgtgtaacggaagttttttatcttattttatttgggtaaaaaatgtgtgacggaagtcaggctgtgcaggtttctatgttacgagacttttggacaaacttaattaggcttcatattaagtttttatttgtcgtaagtcattagcccaatatacatctttctctttatgcccacatgagttatttttttaattcatcaatggatgtatattcctagcatttatcaactcataatcatatcaaataagtctttattttattttaaattttatttggaatatttacaactatagtttgaaaaagttttaaaattataaatatgcaaattaccttttttgtttttataatacgttcaaatatgtctttgattttttatatatatttgaattttacttttgatttctgataaatttttctttagcatttgttttataatatttaaaaagttttattttagatatttatcttcagttaagtgataaatatttaatataatatataaatttttagaaaccaaataattgtattgaatttttagaaaacttgaatacatcactgatatgtaccaggtgaagtatccaaaactgtatcagtatagaatatgtgaatcaaattgaattctggtctggatactacctatatccaagaatatcatatcggatatataacggatacgtgaaacaaattgaagtatcagtgcttcatatgcagcaagcatatgcaatctaactattgtttcatctgtttttgcagttcttaagggaagaaaaacacaagaagcatagggatatacttgaacaatacaaatcgaaagcagagtactatatttgctcatgtctcaacaaaaataatgatagcaataacgtgaaacgaaccccagctggattaatctatgtccggcagtggaacaacatgcaatacgtttcaacagcagcatttctgctctcaatatactctgatttccttcaaaacacaaatcaaaagctaaattgccatggcggcacagtggaccatgaagaaattcttaattttgcaaagtcacaggttgactacattttggggtccaacccaatgaacatgagctatttagttgggtatggccctaactaccctaaaagggtgcaccatagaggggcatccattgtgtcatacaaaaagaataaagggttcatagggtgtactcaagggtatgataattggtatggtagccaggcacctaatcctaatgttctggttggagctttggttggagggcctgatgggaaagacaattttgaggatcgaaggaacaattttatgcagactgaggcatgcacatataatactgcaccattagttggtgtttttgcaaagttcttgcatatagaaaaccaaaaactggttcatgattgtaattcacttttggttgcctcctttaaataatacaatgaattaaaacagtatatgtttctcataagtcaaaagccaacttttcaatcacttttttctcctcattgatgagtgatttgtggtttggctgagatttttcggcctcaaatgtactcaatataaacaaatatatctatccattcagattgatgatatcagcttgatttgatgatttctcttttttttttttggatgattacatcccattgaacaaataaatgttgccaattaggaagatggaccctaatccaaaagcaatattcagtgaggtacgtatgaaatgggtttggatgacacattttcatttgggctgttatttacattcctcctttttactttctgcattcctgccagtttgttttttcttttaaaacatatccttcataaaagctggtttccataatatagttaattttttattatgtgtttggttttttattttaataaataggcttaattttattttttttaccctcaattttnnnnnnnnnnnnnnnnnnnnnnnnnnnnnnnnnnnnnnnnnnnnnnnnnnnnnnnnnnnnnnnnnnnnnnnnnnnnnnnnnnnnnnnnnnnnnnnnnnnnnnnnnnnnnnnnnnnnnnnnnnnnnnnnnnnnnnnnnnnnnnnnnnnnnnnnnnnnnnnnnnnnnnnnnnnnnnnnnnnnnnnnnnnnnnnnnnnnnnnnnnnnnnnnnnnnnnnnnnnnnnnnnnnnnnnnnnnnnnnnnnnnnnnnnnnnnnnnnnnnnnnnnnnnnnnnnnnnnnnnnnnnnnnnnnnnnnnnnnnnnnnnnnnnnnnnnnnnnnnnnnnnnnnnnnnnnnnnnnnnnnnnnnnnnnnnnnnnnnnnnnnnnnnnnnnnnnnnnnnnnnnnnnnnnnnnnnnnnnnnnnnnnnnnnnnnnnnnnnnnnnnnnnnnnnnnnnnnnnnnnnnnnnnnnnnnnnnnnnnnnnnnnnnnnnnnnnnnnnnnnnnnnnnnnnnnnnnnnnnnnnnnnnnnnnnnnnnnnnnnnnnnnnnnnnnnnnnnnnnnnnnnnnnnnnnnnnnnnnnnnnnnnnnnnnnnnnnnnnnnnnnnnnnnnnnnnnnnnnnnnnnnnnnnnnnnnnnnnnnnnnnnnnnnnnnnnnnnnnnnnnnnnnnnnnnnnnnnnnnnnnnnnnnnnnnnnnnnnnnnnnnnnnnnnnnnnnnnnnnnnnnnnnnnnnnnnnnnnnnnnnnnnnnnnnnnnnnnnnnnnnnnnnnnnnnnnntgaattttgccctaacaaattaaattgacatattttatccctaacttttaagaaaatttgcaaattttattacctatcatttgtccactaataaacacaaaagttggaagaaatttgtttcaaaaaataaaatatttagagataaaatttgccaaaaaataaaaaaattgggtgtaaaattcaccaaaaaaataaaatgaaaattggagacaaaaagtgcaattatgttagaaataaattgacggaggatataatttgtaagtttcttaaaaatttagagtaaaatatgtcattaatttattgggataaattcttaaaaaattgaaagtaaaaactataattaagtctaataattaaataatttgataaattgagaaatagggatgaaaacgttagaccaataaaaataagtcaacatactcatataattaaatatgtcagatacaaaatgatacaattgaaatgaaatacatccaaaaaatacaaagattatttttggattagtgcatatgttatttttggaagacttgtttttgaaaaagcagatgcttttgcttcaataatctttttctgtttaatgatgacaaagaaaactccatggaaatatgggggctcatagcaggatgagggaaaagggatctgcattaggagcaatagttggtaagacagtattgtaaaaccattggaagaatttattctgtctattgatattatacttggatggaatttgtcttgagaaagagcttcttctagtccttcatgatacctttccatttccttcataaagcttactcttcttcgccttcagcatcagaagatgctcttctcttcttgctagagggaggatgtgcatgcgcttcagctttatcttcttcttaaggtttttccaacctcattctctttatactttctttctcagagaaagtgtagtcctcacttacactcttacagagtcaccagtggagacaaatgtcgatgttaaaccactcttcaacatcttccttgcataatagacgccacccacacttctttatttcaggcttacgaggttttgttgcttacgaggtctatttatttataaaatataatagaaaataaaaaatacatattacactaataataataatataatattattaattaaaaaaatttataagaccaatattaaattattatagtcagactagtggtctacaattgataattaatcactaagtctgtagcacactaatacgcctttgttcgcttcaccttctcggtttccagtgcaattttaattgatagctttttatttagttgttggttgcataatacaagatgttatgaattgagcttcaactatcacttaaatgaggcaatttattattacgggtagtaaattaggctttgtttgggagatggattttagagggaaagggaaggaagtgaaacatttaggtagagccatctttttgtttgggagttttaatttttgagggaaaggatttgaggatttttaaaactccactgaaatcctccaaagcttacaaattatagttcccccaatttgggagtttttagaatgaaaagtaattaaaattactatcctatcctaactacacattcaaaaatatattgaaatatatttttaatatatttttacatttaaattatataatgttcacatttaatatcttattaactatccatttcctctcttaatatatttttaacttccaaacaagaaaaaaagaacttccttcatttttctctcttttcttatcctctcttcctcttgaatctctttccttccctcccctcctaactcccaaacaaaaccttagagagtatgttaatgaaacttttattacttattagtctaagtttatgccttagtttttaaaataggttaagcctatttatgtaaaatctagcctgatttgacatgttctcttgtataattctgaccagttgtaatgtattaatgtggtattattttatttatttttgtgtgaaaaagggaaagaaacccagaagaaactatatttttggttttttttatcttggagaaacaaaatatccattttgtctcgctccatgcgttggcttgtttttcatttttcatttcatttgtattttttgtattttctctatttttttatcgcaattggactatgtggtccattttggattttttttctgtttgtttatttgttattttttgaaatgggctcaaacaattttattatggatgttgcttcttgcatttcggaaattccaatcgaaaagttctagccttttattgttgaagaagagagaaacaacaaatttggggctatgctagtccaaatcataataacaatacaaaaacaaataaaaatgaataaaaacagataaaagaaagacggatttaaaagtctataaaagggacccaaattttggtagagtatctttccttaaaaagcaattctaatgaagtaaaattgcatgatatataacacatgttggtaaaaaaaagataagagttttctgtgtcatgcaggtggtgtctaacttcttcttttacttctttatgaaaggcattaatttagcttctgcttcaaacacctcactgcatctcttaactttgtggaaacgcatgaaatcttcagaggaccaatgtcggtgttattactgccactattgcaatattcttccctggttgttgctgataagcgctcttcaacatcttccttgcacaatgcacgccacccacacttttttatttcaagcttacgaggttttggtccttgatgagaatgttcaacaccactacgaggacgagtttcagtagccagcaacaactgaagttggttcttttcacctttcacatcttgccaacagtaatcacgattaataggtaagaacctaacgaatagttgagggcgatctacccaaccttgaacaccatatcccaatttcccaacattctgtgaggccattcatcttctttaggatctttttagaagaccataaaatgctacgttcccacaaattttccgacaccttaccttctaaaacaacacacatgtcacatggcaattcttgaccatgcagtggaacgccaagaattagggatgtttgttactattgatactgctgaatcgaaaccatagtgatttctcgtgtcctcgtcaaaagaaatacttctgttttcaaaccacgatggaacttcactccccggaacctgtaatacgagatgcccctctgaacgctgtatgataaacaaacactatgttactggaaaacaagtaagtattaagtgaaatcagcctacaattaagttaaatccaaagtcataaatgtcacccaaatagaaaactatacaacaatctatggtgcagtatgtcccctcaaaaagtcaaggaatttacatggttaaaattccaccaaagtccaatatatatacttagaagaggtattatagaccaaagagatcaacttcagtgtatcttttgcataagtaacatagaatcaacaaaatattttgcttttctcttgtaatgtttcatacaaccatttggcaaaagagctacatgtgactaggtgcatacatcccattaccatgtttaggtaaaacactatattggtcacatttagggaaggcaaataggagggaggagataaagttctagaaattcatttgaatttgtattatatggtcaatgcgggtgcatagaaaccaaatatactttagttcttatcgatcaactgaacacagatgaagtggtgaaaaaatgataaaggtgaaaagtttgttatgaattaaagcaatgatatggaaaatatatctgtcgtggtggtctaacccattttatgctactacttgagcatacaacgatataataatgggcaacggtactccttgtactccaccatctaatatatttttgtcttataataaaataaaaaatatatcaccatttagtccctaaaaatatataacgccatattaatttttaaaattaaaaaaattctaaataacaccagagtgcaatccatcaatcacgttaattcacacacatatataacttaagagataatattaatatgtatttagggaccaaattaatagtaagcaatttagttggaataattaaaattttcaatgtcttatttatatagaattttcttaatttttaaatattaacaagatagtgtattacgtttttagaaatcaaaaccataccaagtttagtttaaaaataaataaatttgtgagtatgttttttcatcttctttggacaattgctaaatgtaactctcttgttataaaatgcacttccctttatgtaatttgtattttatttccctcaaagttacctcttgtttggaaactaagttgtggaaagtgttaaaaaatttaacacttatgctaaaattgcacccctatctttgctttaaaaaagtagttttcaaaaagtgtaataatactttcaaaaactatttttcagaagtaaaaatgggagttgtatggatctatcaagagagacacaaatgaagtctcttaacattgttgtctttgagtttgtcctctccactttcacaaagcacgtcccctaatgtcaacctattccttacaatttaggagctttgagagacagtggtgttttaggaagtcctactttgggtctctcttgacaaatttataaaactactcctaattttgctttcgaaaagtaaattccagaaaatattataacatttttagaaagtagtttctgaaaattaattttaggaagtcttaaaatgttagccacttttcagaatttagttttcagaaagaaatcattttgaggaaagaaaaaacataaaggaagtacaattagcaaatatgagaagtgcattaagtgaatttcgttggttttggtatttgatagcgaggagaatcatggttgacaagcattgccaaaattttgtgcctcttaaacgaatatgtataaaaattgataatatcaaagtacagtaaaagatgtttcatgttgaatagaaaatgcacgaacgaatgattgaataattatttaaacaaggtacatcgtattcaaaattattattgatgtataaaccataaagaattaactatctattttactattttaaatataaattcacgtgccttttacgtacaaaatcattagggggggggggggnnnnnnnnnnnnnnnnnnnnnnnnnnnnnnnnnnnnnnnnnnnnnnnnnnnnnnnnnnnnnnnnnnnnnnnnnnnnnnnnnnnnnnnnnnnnnnnnnnnnnnnnnnnnnnnnnnnnnnnnnnnnnnnnnnnnnnnnnnnnnnnnnnnnnnnnnnnnnnnnnnnnnnnnnnnnnnnnnnnnnnnnnnnnnnnnnnnnnnnnnnnnnnnnnnnnnnnnnnnnnnnnnnnnnnnnnnnnnnnnnnnnnnnnnnnnnnnnnnnnnnnnnnnnnnnnnnnnnnnnnnnnnnnnnnnnnnnnnnnnnnnnnnnnnnnnnnnnnnnnnnnnnnnnnnnnnnnnnnnnnnnnnnnnnnnnnnnnnggggggattcacgtggcccttcctcttcctctaatccaagttatctatctgttcttgcccaacttatcacaaataaaatccaaatctatccaaaactccactcagtcacaacatataatacaagcaaacaaactagatgaacagttgcttctctcaatcaataaaaaagtaaatgaacaaaagataccctcaattatggaggctctggccattaaagagagggtagaaatatgcaattctgtctggtaactgttgaaaatgataacattggatttgtttcattgcataatgtccagatttctcgcctttgaggtgcttttggaggacatgggataaatgggttccaggtttggtcagtggtcaactacagtcaacacaaattccaacatttatcaatcagtgcggctcataaagttgcttcactgtggacactggtcatggtagtaaaagctttgtcaaatgtgtatgaatgaattaccttattagacattgctatttgcttcatggattctgtttttccaatgggtagacctcaatattataaatactctactaacatcatttttttttatcacattattatcatttctcatatttatatatttttaattttttttccttttctcttttgaggccaataattaatatcataatgtatgtgcattatctttctttttaaaaatatatcaatgaaatttaattcaattagttgagtaaataatgtacataaattattatttaaaaaaataatacttaaatccaattcttttacacatattagtcttaatttattatttaagtatattaataaatcataaattaagaatattttaatttttatgtacattacaattttaaacaataaaatataacttaaaatatgatttttaaaataattattttaaaaattaataaacatattataagtaatatatatgataaataataacatatggttagataatagtattttactgttaaaaattatataaattattaagattattttgattaagattatgttaattcgactaaaactaaattttaaacttttaagtaacattaaattttgtaattaagaaaaatttggttaagaagtaaaattttattaaaatagcttaattgtcgaataaatatttatcaataaaaattaatcattaatcaaattaaaaaaatatattacatctataatataataaaagaaaaaaatgtttttgtctttctagtttgtaaaattcctatagtacttcacattcaaatattttggtctctaaatttttaaaaattaataaaaatatttatttctcaaaattagggatcaaacctgacagtgaagtaaaaaaactaaaacaaagaatcttacaaagaatagggattaaaaatatatatttttcttttaaaaaaacttaatttccaaactaatattatttttacagaaaaatattgacttttgacgatctcttgcagcaaaaaggaagctttttgtcttaaaaaaattacgtatatttatttccagatttgaaaaatgtttcattgaattctcttcacttttatttatttattttttttatcgggaagtgtataaaaaaagagaaaagaaatgcattatataacaaccgaaagtttcattttgtgtctgccatttgtctcacatcctaagaaagttccctttttatgatctctttgaaagaattggattcgaagttgtgatttttgcgcaaatgggtatcgatcaacgtcggtggcggcggcggtggtggaacgccgtcgttttgattggaatggtcggcgttacagtagtaaccgttaccggttccgacagtcaccagaagcaaaaacaagtggtgtctcgaattgccttcggatcatgctccgaccagagcgctcctcaggttccaaaaaaatttctattttgttatgcttttttttttttttctattttaatttttctactttttattctagttctgttttgttttgtcttgtctttgttttatttatttttacccatgttgcagtgtcgtgtaatgaaacttgtatgctaatgattctgtttctttgtttcaaccatgatgtcccaattcttgtactagcatgctgttgcagtgccaatgttacgtcagctttaagcaaactgcagttctgttgtactcaacttaaaagaaaaccaacaacaataatgctgtaaaaaaaagtgtcttgtggataaatggtataattttctgcaaacaaaataaatttgattaattttatggaacatgttccctgtttgtaagaattgttggtggggataattatgcatagtataatttttgttcaagagtgagatacgtgtgaaattccgttttatcccccagtttttagaagaaatcaaaattcattatggagtagtgtgtttcacacttttatcactaaaatcattcatgttttactgaaactagacaactttataatttacattgtacgttactgtatggtcttttgtagtatttcttaatcaagccatctaaattgtattgcatctacaactaaattcacgtaatcacagagctagaagagaggagttaagccttggtatttttttggttgtagtttgggtttgcaatcttacattggtttcttgtttgactgctttaggctacaaacctcttcccctgcacaagttcaataattgtgattatttaggcttttgattgctatgcttgcaggatattcttaactttttcacgtcagctcatttatatatgtgcatgctgagtgttttgtttctttgccagcccatctgggatgcagtggttaacttccatccccaaatttttatatggctgggtgataacatttatggagacttcaaacgccctttcaaaatatttggacaggaaaggactgttggaccgtggaagaatgttccacgatttgttccttcctctgagcaggaaatgaaggctaaatatgaaaaagctaagtcaaatcctggctatgctcgactccaacagaatgctgaggtgcttcgttctgagcttttctacttgtttttgctctctagtagatattctcattcaaatttctgagtactaaaatggcgactatgcttatcaattcttttggcctgactttcacatttggtatgttaataggttattggtacatgggatgatcacgattatggattaaatgatgcagggaaagaatttcatggaaaaataaccaaccaaaagttgcttcttgatttcttggatgaacctcaaggtagcccacggtgggtggataatctcttttgctgcattatcatgtcgagcgtatctgtattctacagcttgggtgatttgatttatattcttttaagaaatactagtatataattgaatcgttcgcttgattccgggggttgttttccaaaggaaagaaatcgcctttttaaattatcctatggctgtggaacctcattattttcttggagagtgaaggcatgtttacgtgtctggctaatatacgtattcacccattaataaattttaatggcaacagatacagatttagattttagatacttatactctagcttctcatttcaggcggaaacaggctggtgtatatgcctcatatacgtatggtcctgtaggtagagatatcaaggtattgatcaaataaaatgtatcttctttgttaaattgataaagtcctttcacgattattgtgctgtcataggatgtaaccatgatcatcttaaaatgtcttttgatgtttaagaactcattttgtttttgtcaataattgacttgagagttgcttttaaattgtgttttaacttttaagcatgcctcttgtgcttatatttgcttttactgtggtttggggaaaactgttcagattgtcctcttagataccagatatcacagagaccctgtaggaagtgatggaaccattttggggaattcacaatggttgtggttggagacagagctcaagggtccaccaacagctctcaccataattggatcttctattcaggtacagcaattaggtatcaattgttataatgccagagattaataagaattattcaaaatactaaacatgataaatattattacatgtcatctgcatctttatgagttttgtctacattatcaattattatgcctgtattcttgaaactgtatatctatatttgactgggcgcttttctcatgaagatcttgctgaactcaatatataattcagttttgtgcttgaattgttgcacctcagaaaattgagattcgtttttatattgttaatatgaaatcatttctatattcttttctatgtcaggttatatcaaatctttcagcaaccattcatccattgttctcaatggaatcatggggtcgttttccaaaggaaagagatcgcctttttaaattaatcgctgatagtaaggtaacaactttcagtacattcattttctatgttttacatctatgttgttaaagggaatcaccttggtatcatttacgtagctgtagtgaggactcatttcacttcttattagtcttttctatgcagagggctggagtattttttattagtggagatgttcactttggggaaatcacgagatatgattgtgctttggactatccactatatgatttaacctcaagtggggttactcaatcagttgaggaggttgtcccatctttcttgcgttcttttgtgagatttgtggcatggtggaccccatctacaatgagagttaaggaccaaaactgcagatacaaatcctgtatttatggtaaacttgtcttccttatttttgggtaagaatatttactgtatattggctttcatgttttgatgtttcaattgtgccattaggtcagccaaactttggaactattgaaatagattgggactctcacccagtgactttgaaattcaaagtcagggacaaggatagtgtcacagttacaggcgttgatgtttcattaacggaattacaaccatcaaattcagagattttagacagggtaaaagcagagcataataattcaaagcattgcactcttgaagttagtctaccatggattgtaagatatcgcctggcaatcttgatctttttcaccttatttggtaagtcaattctaagttccacttgctagtgatcctctgtgtgtgttcgcacatgcgtgttatttactttggatttcactcttttaaagtttccatgcatagtatgattaaaactgaattgtttgtgtttttggtattttgcttactatcatttggtttcaagggataattttcattttttttgttgcagtgatgtttgtttcattcctagtgctagtttacacttgcttcagactttgccgacttgaaagatgcaaaagaaagcacgattgacaatcgtagatatgtacaaagtcagcaaaagggagcatgtgttattatctattctcctttgtagatttaacatcagtggttataggtcaataaaatgtatagattattcttgtactgtttccactaatcaatcctttatcaataggtacacttagaagttggtttttttgtgagtgaattggtggttgagccatttagatatgatgcatagaatgccatgatggaatccggtagctttaggtgctgcttcatgtgattaatttgttagtatttcataagtttgtgttcagttgtttaaaacatggatttgcaaatttggtgtgcacttgtatcaagagatagaaaacaaaaagaaaattataaatgaattgaggtatcttcttggaaaagacatgtaattcgtggcgctgcttcacactcagtttattacaccttttcctacacactctatggtaagaaagagaaatatgtattggtaatgaaaagaaaaaagaagaaaaactaattgtttaacttgctatatagtttttgaaattttaacttctcaggaaaaaaaaattattccatggattaatctgtataataatagtaaaaattctatggccaaagttactatatttactttctgttttagccgtgataaccaaaaagtcctgataggaagtcaacctaaagtcaacaaattctatcatatattcatacgcaacttcctctctttttcctcaggcttcattatcagttgcaccaacaatgtgttttgacgtcaaaagaaagagggtcttttccatttgagatattcttgttgtggtcaatgaataattggcacaccattattaaaaatttaaaatataaaataattgcgattcaaaaattaaaatatataatgtaattttttcttggcgtttagcttctgtcctttcattgaagtcaatgtctcttctactgtccaaaacaacgatgcgttagaataatttgtaaaaagaagagaacactagaagaatagagtatacaccagtccaaaacatgcaactgttatgggttggtacacaactttttcttataataacaatctgtactttatattttcataacactttttttttttttcttattacattactaattttttgctacattttttatttgatcttttttattgtaaaaattatcatagtaagaacaacattatccattttctgcgtctgctacttgcatttttttccaagttaaaaactagtagcatgatgtagacggcaactcgtgtgggatatcccctcaagcaagggaatcgtacatttgtcctcttattttctctaaagtcaaactacaatttatcctcttcccatttcatgtcatacaattctacatcgtagcagtaacgggtggaaaaccaaaaacaagttcatacttattactttatccgcttaaacgtgtccaaggctttaagtatcaatcacaaagataaatttgttgatattgcagatacatgcgatggacacatttctaactaacagtcaacacttaaaaagtcttaatgtttgttggagaaaaaactctctgcacaaatataacaagaggataaattttaataaaaacttgtatatttcactcttatatttacacatatatgcaccttttatatagtattttttatatcaaagttagttacaacaaaaataacaaaaactaactattatctaataatctaactaattgctaattacatcctacgaagaatattctaatctgaatcagaatattccagcaccctaccaagatattttaattgttgtggagtaagtataaacttcatggtaatcatagttaaacccaaagtgttttttaaatggtcagattgatttataacaacattgtggtggcacgagttcttttagaacgtaaaaaacagagttcgagacttcgaggcaacaatttggagaagtccatggtgccctttagtaaaagttttctgtaaaaattgagagctacaagtttttgggtattctataaaatggatctagtcttttgaacacgttccgaatgcagttcgaggccaagatggaactgcgtctacagttggatggaaatataaatctgatacaacatgaagagagtggaaatttctaattttacctaaagatttaaaaactttgtcacatgacaacgacttaaatatatccaagatgaccgtagtgagcatgacggtcatgctaatatgatgacaattatctttgaacagtgtcaaccttccgatgatggccatggtgaattcaccatggccattgataaataagatgaagtttagttcattaaataaagatgaaaacatttatatttttagtaaaggaatctccaaaaacatttataacttgtatttaaataaaagtatatccgttgtcatcttcaaatttaattaaagtagaacttttacttgttacgaaatgctctaagacttggtacaaggaaggcataaatacaatttcacgttaggacaaaaattctatcaatactttatgggtacttaaaaaaatactcaggatattgggtacatctgcattattaatcaactttaggaattaaaatattctatttaagaataattatgttaaatgattatattaatcatgtcgtatgattagatttatatgatttaaagaatgatttttcaattcaatttggagaaattttttaattaataatttttatcaactaattgattttacatataagtaaagtatgtgtaacagtgtgagtatgtatgaatatataggtgtataaaagatacagatatggagaatttttttacattgatatagagatggagattaaagttattactatgcgatatgaattcaatatagatattttttttgtcaagtgtatttttttttaaaaacttttaacatgaaaaaatattgtactaattttatttagcgtttttgaaattaataacaaagtaagtttatgaaatatttgttgagatattaatcttaagttacattttattaactttaaaaaatagaaatcgttaactatactccataatatatatgtttaatagttcattaaaatacttaggccaaacatgagccaaaatattcccttttaagattaaggaatgtgtttgcccaaaaaaattgtaagagctgagtgtattaaaatgtcccccacatcacttaggaatatataaagtcttagcctgtgtttggatatatacgtaccccggaatggatgacgcacatgactattgaagtacatgtttaattatatgaagaaattatttaattattatttttaaaaatcttctattatatttgtttatattattcactaaaaagattataataataacagaattgttgttagagcaaaaaaaaagattttagactaacannnnnnnnnnnnnnnnnnnnnnnnnnnnnnnnnnnnnnnnnnnnnnnnnnnnnnnnnnnnnnnnnnnnnnnnnnnnnnnnnnnnnnnnnnnnnnnnnnnnnnnnnnnnnnnnnnnnnnnnnnnnnnnnnnnnnnnnnnnnnnnnnnnnnnnnnnnnnnnnnnnnnnnnnnnnnnnnnnnnnnnnnnnnnnnnnnnnnnnnnnnnnnnnnnnnnnnnnnnnnnnnnnnnnnnnnnnnnnnnnnnnnnnnnnnnnnnnnntctaattgattgaccaaccctctatatatatatatataatataagaatcttagaaaaataattagtctattcataagaagagatgagatcatatgaaaaatctaacttattctttcctttatttttggactattggccatatgcaattttacatttttagaggatcgatgtttagttttacattgaaaatttgattttaggtttagaattaattgtgttaaaataattttaagttaattttttgttgaacaattaagtatctatttggacacatgttccaacataaaaaatcgcgtccaaatgtttaaatacgtaaaagctacaatggactgcttcataagtgataaaaaaaaccacataaaataagtgaatgcaaatatattatttatagaaataaattacgataaaaaaacattccaacacaaattacattaattcaaaatcaattaacacatgcgcgtgcatgcgaagtgtcctttagttacttatgtgttattctataaatttgacatggcattcccagtttcccacccatgtatcattcaagttcagtcgatttataatacaggttttggctggtaataactatatataacaaaagttaagacttaagacaagaacattattctttttttaattcaacaggggtcatgtgtgacagtgtgtacgtacgtgttgctcgattcatacctctcaaaacagtgttgatgaaaatgaaaagacaggttcttatcatcattgtctgatataggagtgcgtctgaattgaagttttgttgtgtcacgaaattaactggccgtttcttgaacaatatattgaaagtgacaaatgtaagaaacattcaaaggggtcgaatatatacacctttagtaggtgtgttcgttcatgcaatgcaacaggttagatttttaatattcatccacacactgtgatgacaagtagcaggagctaattgttacacgcaccccatgagattcgctgatgcatcaagtacctttccagacaaatttattctctctgccaaagttggaggaagtttgagtttaaattttgagaaaataaaagtaaatattatatacatcaattgatttttgaatagttatttgaaatttatttactaacatgtcatcaaacacacattaaaaaaattgaaatattaaaaatcttagagatttcttttatataaaagataatagatgataagagagcaaagaatggtcattttttaatgaacaatacgtagtcaaataattattttctcttctagttagtttgaattcaattaaagtcaataataataataataataataataagaatgataaggtcaataatagtcattagaataaggaagtggataataaataaaaataataataattagagttttgttttaaaaataatgcaaatttaaggtgggagtatgttgcctcgaactagggtcaaggtaggctcccaaattttgttacatcacttgtctgatgcttacaagtaatagtcactaatatgtttgcatttgattcatttggatctatatcatgtattaatcacggatggataccaaaggtgggggctaacttactttggtacgcaaagtactctttcaaaatttatttttaaaaaaataaaaagttttcattttataaaataaagctaatagtttaagcgaattctccgccaaaagaaacagcagaggaaaatatttagggttgtgagtgtccattgaatgttagcaacacatctttagatatattcttagaacactttttttttacaattagtttaaatttattaaaatctgcaaaaattaaaagtctcattttttttatttatgaatacacttataattttatagtttttaataatttattttatataaataattgtattttaaaaattattattaacacctcttaatatattaaaagatagataatcagtcaagagaataataatnnnnnnnnnnnnnnnnnnnnnnnnnnnnnnnnnnnnnnnnnnnnnnnnnnnnnnnnnnnnnnnnnnnnnnnnnnnnnnnnnnnnnnnnnnnnnnnnnnnnnnnnnnnnnnnnnnnnnnnnnnnnnnnnnnnnnnnnnnnnnnnnnnnnnnnnnnnnnnnnnnnnnnnnnnnnnnnnnnnnnnnnnnnnnnnnnnnnnnnnnnnnnnnnnnnnnnnnnnnnnnnnnnnnnnnnnnnnnnnnnnnnnnnnnnnnnnnnnnnnnnnnnnnnnnnnnnnnnnnnnnnnnnnnnnnnnnnnnnnnnnnnnnnnnnnnnnnnnnnnnnnnnnnnnnnnnnnnnnnnnnnnnnnnnnnnnnnnnnnnnnnnnnnnnnnnnnnnnnnnnnnnnnnnnnnnnnnnnnnnnnnnnnnnnnnnnnnnnnnnnnnnnnnnnnnnnnnnnnnnnnnnnnnnnnnnnnnnnnnnnnnnnnnnnnnnnnnnnnnnnnnnnnnnnnnnnnnnnnnnnnnnnnnnnnnnnnnnnnnnnnnnnnnnnnnnnnnnnnnnnnnnnnnnnnnnnnnnnnnnnnnnnnnnnnnnnnnnnnnnnnnnnnnnnnnnnnnnnnnnnnnnnnnnnnnnnnnnnnnnnnnnnnnnnnnnnnnnnnnnnnnnnnnnnnnnnnnnnnnnnnnnnnnnnnnnnnnnnnnnnnnnnnnnnnnnnnnnnnnnnnnnnnnnnnnnnnnnnnnnnnnnnnnnnnnnnnnnnnnnnnnnnnnnnnnnnnnnnnnnnnnnnnnnnnnnnnnnnnnnnnnnnnnnnnnnnnnnnnnnnnnnnnnnnnnnnnnnnnnnnnnnnnnnnnnnnnnnnnnnnnnnnnnnnnnnnnnnnnnnnnnnnnnnnnnnnnnnnnnnnnnnnnnnnnnnnnnnnnnnnnnnnnnnnnnnnnnnnnnnnnnnnnnnnnnnnnnnnnnnnnnnnnnnnnnnnnnnnnnnnnnnnnnnnnnnnnnnnnnnnnnnnnnnnnnnnnnnnnnnnnnnnnnnnnnnnnnnnnnnnnnnnnnnnnnnnnnnnnnnnnnnnnnnnnnnnnnnnnnnnnnnnnnnnnnnnnnnnnnnnnnnnnnnnnnnnnnnnnnnnnnnnnnnnnnnnnnnnnnnnnnnnnnnnnnnnnnnnnnnnnnnnnnnnnnnnnnnnnnnnnnnnnnnnnnnnnnnnnnnnnnnnnnnnnnnnnnnnnnnnnnnnnnnnnnnnnnnnnnnnnnnnnnnnnnnnnnnnnnnnnnnnnnnnnnnnnnnnnnnnnnnnnnnnnnnnnnnnnnnnnnnnnnnnnnnnnnnnnnnnnnnnnnnnnnnnnnnnnnnnnnnnnnnnnnnnnnnnnnnnnnnnnnnnnnnnnnnnnnnnnnnnnnnnnnnnnnnnnnnnnnnnnntttacttctagtctgtgttctttctttatttcttttgattttttttgggtctatatatcttattttatttttgttagacttgaactttaatgaagaatttgattttaatttccacattgttctagaagcatgcattttctattgtcttcgaaaattgccaatagacaacagtacaatcactcacatagtcacatggacataatctcgtattatctacgcattgtattatcaacagtataaacactcactgactcacattgctctagaacctttcctttaacacatagtacagaagaggatgtggtggtgttgtaattgcatgttgataaggatcattttctcctttaacatacattgagcatgttacttttagaaaatgtttaacgcaacaaatgatgcatacaaatgcacttctccaaaagcttcaatttctggcttcctgtgtaacagatagaccaacaaagcttttcaaatttcaactaaaactactcagttaaaatttgctgatgcaacaaacaaacgtacctgtataatccaccttcatcgtccaattaattgtttgttcatcatggtaattacttgataaagcaagaggagcagaagaacatggatttgtaaaagcttttctttttccagatgttcactacgactgtgactttgtgatggcaaattaggagtgcctatactgttccatcactttcccaagatgttgttttcattaggccagtacggtcttcttaagccacacaacaatagcttataaaactccaaagcacgcggacacaaactttgcagttcagcatttcaggccactcatcttctcatcaagtggacctattacaaactagttcttatcaaacttgtctttgtcatgacatagctaattaactttgcatttgcacactaccttctatatgttgcaactcttggagctgaaacactcacgcacttcagcaaaactctcctcagttatccctccaacagaagataaaacatggtgttaacttcattttcaagaaccctttttgattgttcaaagcttatttctatactttgttgatgtcttaatgatttttgcatttttgctatcttctaggttctagctgcaagtcatggcgaggaggaaaaaggggtagaaggcattgctactgttgattttcgaggtcaccctgtagacaagacaaaaactggaggatggctagcagcagggctcatcttaggttcatattcatctcaatccatagaaattttagtcatgttttcaaggttgaaccaaagcgctcttcaatttggctccaacacatactttttcttttttttatgtaggtactgaactggcagaaagaatatgtgtgatgggcataagcatgaacttagtgacctacttggttggagttttgaatctcccttcagctgattctgccaccatagttaccaatgtcatgggaactctcaacctgcttggccttcttggtggcttcatagctgatgctaaacttgggagatacttaactgttgccatatctgcaatcatagctgctttggtatgttaaaagctttgcatatttagatatactcaatgctcaattctctaatttcttttggcttttaatcacactaaagcaaccaatttctcccttccctctagggaaagtggttttcaattgcaaataacataattttcttagtttaatttctatgcacctaactatcaatcaatcagaaacaaaaatcatcattagtatgacttatgacttgtaaggtaaatattataaaggtcaataaatttattgtaggttagtttgtaattggataacatgtaactaagtaaatacactatttactctaacatattactagctatactatcagtcacaaactagttttcttatcacatctttcttggaccagggggtgtgtttgttaactgtggctacaaccattcctagcatgaggcctcctgtatgcagcagtgtcagaaaacaacaccatgaatgcattcaggctagtggcaaacaaatggctttgctatttgtggcactttacacagtagcattgggtggtggaggaataaaatccaatgtctcaggttttggatcagatcagtttgatacaacagaccccaaggaggaaagaaggatggtgtttttcttcaacaggttctacttcttcatcagcatagggtccttgttctctgtggtggtgctggtgtacgtgcaagacaacatagggagaggatggggttatggaatttcagcagggacaatggtgattgctgttgctgttttgctttgtggcacaccattctatagattcaagaggccacaaggaagccccttaacagttatatggagagtgctgtttttggcttggaagaagaggagtcttcctaatccttcacaaccctcctttctcaatggttatcttgaagctaaggtcccacatactcagaggttcaggtaaattttctgtctaagcaatgaacatgactaagagtaaactacttacagtattagttcttgaaattaaaaaattctaaactttttttaatagtaattcgttaatcatattagtctaaatttaagatggacatattactgataaaaaaagctattaacatatgtttttgtattgggattgaccacagtccgtatggtcaaattgtaatgataaatatcatgtgaaatatgtttaaagattaaaatataatttcttaattttaagaactactaatatgacaattttatacttccatgtaccaaaatggcaatttactcttaatattatgtcggattgtctttttcttcaattattgcacagcaatttcaaaagattttctcattttttgtggttctgataattattactttcacgggattattactatttctattactatctgggacaacataagtgtttgattgtctctagaaaaggacaaattttacgtttgattgaacagtccgtcaaaaaggaattttgaaaacgaaaaaagagcagcgtctgttggaaaggaatagtattttgcccttttttttcaaaaattattttgtaaagtgatttatgaaaactattttttaaaaaacaaaaacaaaacaaaaaaaaagtttttttttagagtatatggttctgccaatgagcacatatttcctcttgacacatctctgtcacctgcgagaaatagaaatgagacatagatctgtctcactcactcacttaaatcacaatggagacgacacatctatttttttttcagctacacactattctgtactccactcagatcacatttagttttgaatgtaattaattctgaagttaagtaatttgattttatttaaatgtttttattaaaaataagttattaatagtaaaacaacgaaaactgttctaatatagaagctatctaaaattattttagttaaaaaatagtttttagaccataaattcatttttcaacttgagattaaatataaatatttattcaaaaacaactattagatattaatgttctttaatgatccaacatagcatttagctttgggtgtttaggccttccacttccacaggcgacgagaatgaagcatgggtaaagagaatcggagaatgcaattgaaattacaaaaagaaaactttagaaaataaaatataataataacatttaattgaacatttaaatattaaaactgacatagaatatatatatatatatatatatatatatatatatacacacacacacacataaattatgaagctgttaaaaaaaattccgtaagtatttttagttaatctttgtacatatcttctaatattttattttcgatataataaataatagtgataaggtttaaacataaaattttatatagattacctaaattttttacgagtaggccgatcctattagatcgattatctaatgtgtattctactctttaaaagagaaaaatcctttactccaccactataacatttttttttttttttnnnnnnnnnnnnnnnnnnnnnnnnnnnnnnnnnnnnnnnnnnnnnnnnnnttgtggtacactcctacgaaacttccagaaaagaaattacagtgatttgtaaattgtaactaccgatggcaaataaggcactcattttgcatggctaattatataatagatccaaatatcttgcattagattgaattatctaactgcaaccttaaaacaagttttggattatatgattttaatttaataccatatttattcttgaatcaacatatgtccatagctatgaattgattcttcggtgaaaatacaaggaacgatttataataaaaatgtcattcatttcctagggaaatagttcactgctttgtatttggtctgacaggttccttgacaaagctgcaatcctagatgagaactgctcaaaggatgaaaacaaggaaaacccgtggatagtttccacagtgactcaggttgaggaggttaaaatggtaatcaagctccttcctatttggtctacatgtatcctcttctggacaatctattctcaaatgaataccttcaccattgagcaagctacattcatgaatcgaaaagttggatctctagttgtcccagcaggatctctatcagcttttctaatcattaccattctcctctttacttctctaaatgagaaactcaccgtgcccttagctcggaaactcacccacaatgcccaagggctcacaagtctccagagggttggaattggactcgttttctccattgttgccatggcggttgctgcaattgttgagaaagaaaggagggtgaatgcagtaaaaaataataccataagcgccttttggctggtccctcaattttttctggtgggtgctggagaagcatttgcctatgttggacaactagaatttttcattagggaggcaccagagagaatgaaatctatgagcactggacttttcctatctacactttcaatgggttattttgtcagtagcttattggtggcaattgtggacaaagcaagtaataaaagatggctaaggagcaatctgaacaagggcaggttagattacttctattggttgctcgcagtgctaggagtactaaatttcatattttttcttgtattagcaatgaggcatcagtacaaagttcagaacagtataaagcctaatgacgatgcagacaaagagcttgtgagtgcaaataatgtgaaagttggagttgatggaaaagaagaagcataagatatagtcttaaaatatcattttgtgtggcccaatatatagtgtgcaagaacaaaacattgtgccccgaatttgttaatttttgggtattttgtcgacctcatttaacgaggacaattgtgatgtataattaagtatttacagagataaaaaaaaggcaaacgacagtgtgagttgtttccaaaagagaaaaggcaattatggaataaattataaatattcccaaactaaaaagatataaataaatgaacacttgctagccaggtttcatgagcagaggcctgaatttgactaatgttatcagtagaaaacactacagaatcataggatcaaactatgacatgatcttgaaagcaaaatttagtccatttgagaccaaagctttaaacaatggcattggatagttttagtatcaagaagataaaatctttaagaacgcagaagactttataaagcatcggtaaccgagggaggtctgtgacttatgaccaacggaggccgtagagctctgtgcgcttcttccttctgcttgcgtgccttgtacatttcctcagtctcaataacaactaacctcttgacctacattaaatacaaagtttaccaatgttagtatacagagggataagtcatatcaagcagaaaatggacttgtgtagagcttttgctaaaacctgttggagcattcccctaactgtaggtgtgttccatcgcatgacagttcgattgcatttgcgcaagcgaagtgcttccaaagtgcgcctatggagcctcctggtccccggaatacccctcaccagagttatatagatattggggctccaagcaattggcacacaggccttgtatgccttgaacgcattcatgccttcagcttgaagtcagaacagcattaagaaacaaatcaagttaatatgtttttcatactcaaactagataccaaaattaaattatcatacaaaaatagattaaaaaaaaaaaaaacaagtttaaataaaatcagtcttgataagaaaagaaacaaaatccatacacttcattcaactccaatactgcatgtttgatactacttgatgcaagcagacagaaaatcttaccttgaataactcacattcaagaaaacagttagagagtgacaaaagtatatgcaaataaagtagtgaaggaaaggtaagaaagcatttataaaacctccttgccattgaaacaagaaaagattaaaaaagatgataataaaagagtgagtaaattacacagacaatctcctaaaatttcttgagattacacataacataaccctcttcttttatttttatttttatttttaacgtttaaagcaaccaccttaaaggggtacacggtgtaatgttttcaaacaataaagggcgttaatataatgtagaagaggtatcatcgtactgttcttccaacaattaagagggtttagcgtaggggtaaaaaaaagaagggcgtcgggagaaaattgacgaaacctcagggggtgtaagtgcaatttactctaaaagatatgtacaatgacattagctcaggcattttatcaaacaggtggtaggcagatacgcaagttagataaatcacaagagccgttacaacccggccaacacaagttatcaactacgattcaacgtgatatagggagactcaattatggatacaaactagaacatgattgcaaattggaacaaacaaagggaatgaactactgaaaaaacaaacaaactaaataaatgtgaagttgtgaatagcttcaagttaagaatcaaaaagagagaaaggattaccgttacgcgcgcggtgcgtgagcgaagaagaacaatcacccgaaaaggttatcggctggaaggaaatgcggacaccactgacggaagtgtttgggttaaaaaatgagaaacccctaacgccccaatcaacaaaaagcacagtttagacttttgtgctaggagttttggtttggtgatccgggccgggtcgggtcggattatttgaaactatccaacagatttcgaaggggaaaaagagtcacacattggtgaggtaaaaagttctcttaattgtaaattgtgttatttaatttttattattctgtaaattttatcaaagcaaattttttttttacagattttatcattcaaaattttaatttggtaacattttattatagttgatggaagattgtttattttaaattttactatcgattataattttaactcatgtaaaaagtgattttctatattggatatgaccataatataattactttttgatatcgatcacaactacatatatacaaaattctagaaaaaaaataatttttatattgttttgttatcaatgtaatggaaaaatatataaaaataaaaaatttggataataaaatttacaaaatgttgaaagttgaatgatgaaattcgtaatggtaaaattcgataaattataaaagttggatgataaaatttataaaaataaaacttgactaataaaattcatgtaataataaaagtttgatggtaaattttgtaaatgtatttaaaaagttttacatagttatttaattataacttattatatattataaatttgttaatttttatgataattaatttaaaagttatattaaaggtaaattatgaaagtaccaaagtgtaaacaatgcacatcatgttgataaaaaagaaagttttttttttttgtttaaaaaatgttttgcaataatttatagtgtaatagnnnnnnnnnnnnnnnnnnnnnnnnnnnnnnnnnnnnnnnnnnnnnnnnnnnnnnnnnnnnnnnnnnnnnnnnnnnnnnnnnnnnnnnnnnnnnnnnnnnnnnnnnnnnnnnnnnnnnnnnnnnnnnnnnnnnnnnnnnnnnnnnnnnnnnnnnnnnnnnnnnnnnnnnnnnnnnnnnnnnnnnnnnnnnnnnnnnnnnnnnnnnnnnnnnnnnnnnnnnnnnnnnnnnnnnnnnnnnnnnnnnnnnnnnnnnnnnnnnnnnnnnnnnnnnnnnnnnnnnnnnnnnnnnnnnnnnnnnnnnnnnnnnnnnnnnnnnnnnnnnnnnnnnnnnnnnnnnnnnnnnnnnnnnnnnnnnnnnnnnnnnnnnnnnnnnnnnnnnnnnnnnnnnnnnnnnnnnnnnnnnnnnnnnnnnnnnnnnnnnnnnnnnnnnnnnnnnnnnnnnnnnnnnnnnnnnnnnnnnnnnnnnnnnnnnnnnnnnnnnnnnnnnnnnnnnnnnnnnnnnnnnnnnnnnnnnnnnnagagagagaaattcaacgttaatcaattattcattattacatatgttatcatattaattcttacaaaaatcatctttaagattaatatagtgaaattttgtctttaataaatttattttatgatcatttaaaaaaaggaactaatgtagaactaacttgaagattatatataatattactaggaaatttatgaaaatgctggcttgatgtacaatttattgtagaatttagtattttataaatttggataggaagcttctcaattaagtattgaagttttttctcatttaaagaagcatttgtattacagttataatattatattttttaatctaaagaaaaattgattttttttcaaagttattaattttttttataattttaacaaattttttaattgaataattttaacaatttaattcccaaaattttattataatatttattttatatgttcacaataagtataagtaaatatcacccgtatcaggcatggggtaacacactggtacttatatacaacatttacacaacaatgttttcaatagatatacaaatttacaagttactacatgttgcataaggaaattataaaatgctattagtcttcatagaaaggcttaaccccattaggaccaattgtatgttacctcggtatagcatgtaaaacaaataactagtatcaagccctactatcaataacatataaagaaagatagtatattgaatgtttctataggtttttttgttttatgcacatactaaatatactttatgaaaagaaaaaatcttacattttcttaaggtctaattaaaccatcaaaatattacaaaatcatttgtatgtagatccaaagtcatgcatgaaaagtgctacaaataaacaaaggtcccacaccctatatatagtattaattaatccaaaaataataataacatacatgaacgacgtgagtgaccaaatgaaggcataagtatatttactattaaaagcttaaacaaaataaaatgagtttcctaaaagattgcaaaagtattatattttctaaagtaacataattatttctaaaataaatataaatataactcctatacattttgtgtttttttgacgaacagagaaactttctaaaagcaccatatatacttgatctaatttaatattgaagcaataatttgatgtgttattataaatttaaataatgaaactgtttgctccattgtccaactatgatgaagaattgtttctctcctattcggaggcgacctcctgaatttgggaaagatttgtaggattagaactaataatttgattttctgacgttgaaactaattaaaatgtattattatccaacataatctataatttataaacatatgaatgagatgatatgtaacacaaaatttttgttctattttatatcaaattaccatgattaattgtacaattctcatttacttttttctcactaccactaatgagacattgatatataatacataaatgatccataaaataacatttagttaattaactaattttgattactgcattaattaactaattttggagattttataaattcaaagttttaaatacttatgcttgtgtacttttattgatttatttaataatcgaatattatatgaatacccgctgattgtttttaaatgtacacatttgttcctttaaaataataaactatttttgcacaccccggacttaaaaaggggcttaaaaaaaggaaaaaaattcttatagtgatgtaaaatctacctttcgatctctgtccttctttccacatatcgatctatacacatatacatcattttatacaaaccaattttatatctaataatgataatctttctcagtcataatcatatattcgttgtttttgtttacacacaaataaaagaaacattagttgctgctccaaatgatggaaaaccttggttacaagaagcaaacaacaagggctcaatcatgaggaccgcataccaacactgtacgaccacaacatttctaacacaaattaacaaactcaattgcacacatatagtagacatgcaacacacgtgaatcaagaaatttttggacaacgataattataattatatacaagtagtcaagtacaactaatgagttcaacagcgttgtttaacccaagtgatgtgagataatatgagtatatataagactatgttgttaaaaaaaaaatggtccttcgattgatgaatcaataccatttagatttttttccagtacattaaattttttttatcagtttaatgcatttaggtatgaaaacaaatcattttcattaaattaggaaacaaaacatacacaacatctctagtgatctccacaaacagtgtagatgatagagcatatagttagattcacgctaacttacatagattgcagttcagagataacagagaattttcatcctgctttctacaatttaaagtaaaacattcatcaatgacatattaaatatagcaacctggcgacctaggaaactaaaaatagatagggttttctcggctaagcttttgaatattctagtagaggattgagttaaagaagcataggcatgccatccattggaaacggcttgcacataacattttccatgtagtagttagttgcatccatcacggcaaattgcatatcctcagaaggcttccaatggcgttttctctgattgatgaaccagttgttgatttgtttcagatctaggcctgtggattctgcaagtgcctgcttttgagattcctacgtgtttatccaatcacattcaccattgccataacattagtcatcggatatatatatatataaatagtaaacaaaactttatgaattaattaatgcacaattggctgttgataccaacatactaacaatttaacgtttcaatattgaaattcatattaccaggattattttctaattaataccaaaggctatagcaccatcaaatgtggctatattttggtgaaaatataaaggaaacaaggtattttgaaatgaaaatatgaatatttatcaatatacacattgtgaaggcatggtataaactataaagagaagtacagctaccacactctataatacgcacacgctactcttgattaaaatatgttaaaaatacaaaatcatacatgagactcgttaaacatgaagtgtgacccataaattatgatttttaatcattttcagccaaataatcaataaagagtttgttaaaaaaaagtgttactagcatttctctattgtttataaaggatgtagaacttagttaccgaagggtaaggccatttataatgcctgttccaccaatcaagtagctgttgccgagcttcctttggcaactttccattctttttcttcttcaaaaattccttcttgaggctccctagatatccactatacttgcgcaaaagctggactttaagttcgcggtcttcagcttgagaatctaggttgttttcatgaacatcaacctcattctgtgaagatgtttcactttgaccttaaaattgccacaacaaaatggaataaaaattaatagttcagtaaaaacaattcatgcaaataaatatccatcatgaaaatatttgacatcataaaattgcatgtcagttataactattgacaaccaacacagaaataatacataaataattctaaatcatactaatccccttactagataaagaaagtatttttatttttatttttattttataagacattaattatatttagttattcatttaatacaattttcataaagtattaagaggattagtagaataatatgataggaagatataacattattttattttgatatgtatcaattaaagaaagaattatgttaagattatatgttcatttttctgaattatcaaataacatgcattacctaagaaatgacaaaaacatgttaaaactaaatttcattgcaatgtttttttctggattacacactagctttgttactaaataggagaaagttgcaaagaaaataactgaactttagatcagtgcaaaatgtatctcaccatgcatacagataacttcttattataaaaggccatttaagagtacaacctttactaaaaaaaagtaagctattataaacaagagatatggttcactgttagagctaaaaatgtaaccctttcctccaccaccagagaacatactaaggaaggaagtaacaaaataatcatgcaaactcaaaatttacattggtttttttttttttttttaattaagctacagaggaaacaaattgacaaggaaacatatggcaacataagataagacaaggagtttcctttttcaactaagttcttaaagggactttgacagagagagccatgcatctaaatgaagagaatgaattaaacagaaagaaagaagactaatgccttgcaaaaggtgctcaatgagtacgtatgaaatagtgagtaacaccaaggtcacacgaaccaaaaagaaaaatacctttaaaaaataacccgaaggccatcaagattatcaatgggtcacttgattaagcagcatatattattggggtacgcataaactttttatcattagaataataaaacaaaatctcatttttcttgatttcccctcaagcagtaatatggattaatcatcgttttcaaactttttgacctaattcaaacaccttggacccattattattaacattcttaaaaacactgtaaaggtttttaatcaagttcctttataactaatcacactatttacgatgagaaaggtaatttgattaactctttccaattaattcagatgatgatatataataaacaaacaaattcagcatcacatcattcttagtaaaaacacatttatccagcacaggcaggtgtcgttttcgtttttttattggtttttattggtatcaattgcaccatcagctgtgtggttatcattaattactctaccacttaatattaatatttaataccaacatttagcattgaaagacaatattgcttctgaagatcagagttatgagtagtaactagctagcaaggtcatagatcccttcaatgcttgcagcatatttccagagggttaaaagactttgagacacagaagaactaccactagcctaagggtatagcaagttaagccgtgattcatcattacttagcctctaaccaaaacctttccacacagggttaatttctagtaataatttcatagtggtaaaacaaggatccatgattgtgttgctaattcattcatctttcttttctctcctatataatatataggtcacacgagcatggattactaattaagttgactctcacatatactgacacccaatctttgtcacccacttcccagaacaagaaatcgtagtccataattgctccacagtactcagagaagtgtaggaacaaataatgatttaagggtaattaatcaccaaaatctgatgaaactgctagggctttcagctgacactcaattcttgagaagaaaagcatggcttctttgaagggttttgttagctcttgctcatacttaatgagcatctcacagtaggcctccatgaactggtccagagctggatcttcacctattgaaccacctcctgtccttcctgatgatgcattgaaggactcgcatttggcacatgactcctctaagctagccaccacttctggaggtgctccaacctgtaaatactccactcacaccatcaaaacaagaaaaacatgaaaacacataaacaaaaatctcaaagcaaaaccacaacagaaaatttgagtcctcatgaaacccatgaaagagaagtagagatatgagtgcaattatagtttacaagttaattacaagagtgtatgatcttatagataaggaatattttttttttttttaccgaaaatattttttagttaatattgttagtttttgtctgcgagatttcaaacccacaacttctttttccttttcttcttcctttaccactaaaccaaccttatacattctatataaggacaatttgtgttaggaggaaagggaaatagatgagtgtaatttatgtgaatatggagaacaatatagagtttatcatcaccttgaggcaattgaggtaagaggacaagagacgaggaaaaagagggtgtgccatgattttatccctcacactgcaagtgtcggtggggttgtggtggctgtagtgatgttcctgagcgatattgctattgctagtgacaggtacccttctattatcactacttctgcgcatttgggcattaccagagttgttgttgttgttgttactgagaggcagagaaagaaacttcctattattagtttccatgttcatcatgtccatctcagaaagctcactgcaactgttccctccaaaccctatcatagtttcaaagtaataataagttgtgtagttaaaacccttgaaaggaacgaaaatgaaagtgctctctctctctctctttttgtttcactctctctcaccatgtaaaaataactaaaactcctcatgctacatatataatatatgtatttattttatattataaaatagtaatagtaaaataggaatagtaaaaccaatagctgtatgagtatgtagctctactacctctttggcttggatcagttgttcctagttactagtccccaccttactgttttctcaaaaagagcacactgcatataattgtccagagagtactcccggaaatgaagctaaaaaatctgagtcctttatttgtagaaaactccaaagaacctaaatggatagtcagtcagaacaatagggatttttgggctcttggctctatagcctgtaaaaggtggtgggaatcagattcagattcagattcagatatcagagtcctccccttgggaatgtgtagtctaccttcttccttctgtgcatcaacagtgttgctttgcttcttattaatctcattctctctctctctcaaaaacactactaccagtgtgctgttgctgttgctgtgtgtgttgaatgcaggtggagacacagaggctacacgcagggttaacgtgtggttctgcaacttaactctgagttttccttcccaatgaaataagatgtatctatgtatgtgaataatgtgaaactccccctcttagctagctaggtctatgcactaccactgtttatgcgtagtactattgttggctatctatcagtcacactcacatcatgaaattaatggaaatggaggagagagaaaaattgcttcactctttcactaaaattatatccaaagtaaaaacagtactagtattaattacgtacttatatgttatgcttcttaattatcttatatttattccatttttaacatgcttaagtgttaaaatattcctaagaatatttgcaagatttattttatatatagatgtgtaacaattaagaaataacttttgataacaaaaaggattaagttaactttttaacaagtactatgttagattgagatgtgcacattttttgttagttagattggaatcatatcaaaactcagtggcttagaataacggaaagtgttaaaacctgttgacaggaataaaatttaagtatttttaataaatttaacgtgttattaattaagttttattaaatatattgatattaatataatataatatgaaaaaaaaaatttagtttcactctaataaattgtaggggtaaagagaggagttggtgtgattgaaaggaatcaaacatcaaccgtccatcgacacctatcacccatgtgatattcctttgggagatattggatctttatcactctctcacacataccacttttgctttagtatgatggaattggtatatattagccactaggagggtgggttaatgagaggaagacgacaccgttttgtaaattggaatccatgcaaagacacacatatgtcagaggggtcatgtcaatctaatcaaatggaaaaaaatagaggagaaaaatgggttggaagagatagacatagcaaaagaagcccatgttatataagatgttgccctcattgtgggacactacctgcgtcccttcctttcagttcattactattgcgtttcttaccttaccctacacgaatgattgacaatttgacatattgtgttttgccattttctttctcaataaataatatatttacttataatacaatatttatttatataccaaaaagaaaattgtactcagagtctaaaatattctttacattatcaccacagattaccatatattttttacaatacttatatatttttagaacatttacagccattatcttttttttatactgtacagtaattatcttataaatatattatttctaatattatttataaaaaataagttataatataaaatgcatcataacttatttcttgtaaatagaaccaaaaatagtattaagtgttatttgtgattatatgactattaaataatttaaataatatcggtgctaatctaatggtgcaaaaatttaaataatttgtattaaattttctgttcacattttatcnnnnnnnnnnnnnnnnnnnnnnnnnnnnnnnnnnnnnnnnnnnnnnnnnnnnnnnnnnnnnnnnnnnnnnnnnnnnnnnnnnnnnnnnnnnnnnnnnnnnnnnnnnnnnnnnnnnnnnnnnnnnnnnnnnnnnnnnnnnnnnnnnnnnnnnnnnnnnnnnnnnnnnnnnnnnnnnnnnnnnnnnnnnnnnnnnnnnnnnnnnnnnnnnnnnnnnnnnnnnnnnnnnnnnnnnnnnnnnnnnnnnnnnnnnnnnnnnnnnnnnnnnnnnnnnnnnnnnnnnnnnnnnnnnnnnnnnnnnnnnnnnnnnnnnnnnnnnnnnnnnnnnnnnnnnnnnnnnnnnnnnnnnnnnnnnnnnnnnnnnnnnnnnnnnnnnnnnnnnnnnnnnnnnnnnnnnnnnnnnnnnnnnnnnnnnnnnnnnnnnnnnnnnnnnnnnnnnnnnnnnnnnnnnnnnnnnnnnnnnnnnnnnnnnnnnnnnnnnnnnnnnnnnnnnnnnnnnnnnnnnnnnnnnnnnnnnnnnnnnnnnnnnnnnnnnnnnnnnnnnnnnnnnnnnnnnnnnnnnnnnnnnnnnnnnnnnnnnnnnnnnnnnnnnnnnnnnnnnnnnnnnnnnnnnnnnnnnnnnnnnnnnnnnnnnnnnnnnnnnnnnnnnnnnnnnnnnnnnnnnnnnnnnnnnnnnnnnnnnnnnnnnnnnnnnnnnnnnnnnnnnnnnnnnnnnnnnnnnnnnnnnnnnnnnnnnnnnngaattatatatattatatttaactattagataaagaagatgaaagatgaaatcaaagaatattaaaatactgttgactttagatcaaagagttaattctcatccctatttttttatttatctaataattttaactagtgacttacattcaatagttagaataaataaataaataaataaaggatagatataaaaaaaaaaagtaacgctttcagaattaatttttggaataatttaaatatttgatcactcgtttatacaagattacagtagataagcgcatcggttaagcatgacagtagatatttaatttctaaccatgtatacatacaagtaaattattagaaaaataactcatttctttaatctatttaaaaaaatcacttaaaatgtctaaatattaaaaaaaatagaagagaatatttacttttctttcacccacaccatgctcctgttttctatatttacccctttgttggacaacggacatggatgatttgcggagagtttacggagtatctctctctctttcatttctttttatttttaaaaaagttaaataaatttttagtgatataatttcttaaaattaaataatttattttgtgttaaaaatagtagagtaaaaaattatatttaattaatataaaaaatataagtttatttatttttttatttgactctttttctgcttataaaaaatagagaattttttgtatgttatttttatttttatccattcaaattcaaacaatatatttttcttttactttttcttttttcttttttctttcctatctatttcacttctaatttaaacaaaacattattttttaaaaccaacatgttgttgatagtgtaaaactggatactattttgtgaagtaaaattttgagtttaagttttgttgataaaaaaaattataattaagagaaaaaatcaaattaaaattgataaatattttacgtcattttcatgataattaaaaaaaaaaaaaaaacattaatttgtcggtggtgagttcatcaccctgctaagtcccatcctcatcggaatgatatggtggagtttacttactatccttagccaaccatgcaatgccatgtagtccacagaatcgcacagaatcaatggtgaatttatctacgaaatatcataatgtcaacttcgaagaagaattagggttctataattccaagacatggatcggatatccctatacgtttaataatataattgctttagaacttactgtaactaacttatgatttactatttacagacatgataaagtagcttgttccacttgtaccctatgattgacaaattttatcaattaagtttttaagaaaattaaaagatatccatacttttttcccgatagttgatgatatataagaatgtttatgtctacatgagatgtctctcaattgtaccactgtaacaatattcgagaatttagtgtcaaaataatgtatatatcttaataaataaataaaaggcggaaggaaattaaggagatctcgattccatttaaaggaagtgtcttttatctgaaggattttctttcttaatttattttattttattttggtgttagaacgtttttcttgtatttaagaatatgataattaataagttattgttggagttttactcgacttaatcttcttgtataagattttggatttaagacttataaattaaaaaaaaaaaagttatgtgtcaaggcttaaagtttaatgacttattaatttatatatgccaaggcttattcttcttgtataaaatgacttataaaattaaaaattatacaagaagattaagtcgagtatataaaatggcttaatcttcttgtataaaattttacgtatataaattataagtctttattttttatttttacgtatataaaattaaaattttaatgcaaacaaacaacgtaataacaaagagagtaaccctgaaggtttctccgtgatttatttggataatgacttctaaatctatatatgttactatgcttcatgaaataagattttcttcatggggcagttagaatgaaaaagattgtcattttctttacattcagtgatgttgcaaaaagaacatcagctcaaaaaaatgaaaagttaacaaaataatataatgactaatgactagctgattagattcgtagatgcttcacttttttctaatagacaaatcaatttttattttttatgacaaaacattcttgctatcaaattgttgtaggctcgaggtccaatctgtaaaaagggttatattttagatcaattatcaaccaataatatacatgataattttaaacatctggttttatttttatttttgtgataaacatctgtttctgggccttttggtgataaactcgtcttttactttctgcgcctcattcttcgcttcatgcaccccatagaaaacttgaatggacaaatatgtcctttcttccccatctccatctcttgccacccaaaatcttccatagccaccaccacctaacccatagcaccagtagattcaccaaccacgaaccacccaaacatcatcgtggccaacaccgtgctgagccatctcattctggcgcaaccaaatcccaacccattcatcactcacatgtgcatgtgcgaccactcacccatactcaattttgggaaaaagttatattttttggaattgtgctaacataattccattcaagcatttccggaataaatgttgttttccggagtgctaacataattttggaaaaacatttctggaatttcttagagaggtagtagttgacaaaaaaaaaaaaaaacgttgaccaacataatagaaaatatgtcaaactctttccactctttttctatgcctaggagttgtgatattccgtctgaacagtttggtgtgaaagccacacgaatgaatatgcaaccaatcattggatgagaagagaaaacacgaaatagctaaaaatattccagaaagtaaataaaaagttaatattacgtcattttgtaatattcacatggatagaattcgtacaaaaatcatcaacttcttttcatattcattcaattgttcgttatcttcgtctctttttgtctttattactttgatcatttacactctgtttggagggaaattgagaggaagaaagaagggtaaaaataaatgtcttccactattttattttgagtagaaataaaggagaggaatgacatttcgtgggtttcatatgatttgacttccatccaaaaatataatgaaataggactaaaatttgctccttcactaaacaggccattgctctacttgagttgtggaatatcaaagcctttgtattgtcgttttcattcctcctttgtattgtctacttgaaattgcttgtcaaacaattatgaggtattgatctaacaagtttttcctatagacatgccatccttggcaactacttgacactgtttatcaactatttacactttaaccagataatactggtgcacggcacaatgagtcggatatcaaaattaggatgcggaacttaattggagataataaaaccccatgaattttcacattgaagataataaaagttatgatcctcctaataacaaacatagaattacaatttaccccttccccccactcacaccccccaccccannnnnnnnnnnnnnnnnnnnnnnnnnnnnnnnnnnnnnnnnnnnnnnnnnnnnnnnnnnnnnnnnnnnnnnnnnnnnnnnnnnnnnnnnnnnnnnnnnnnnnnnnnnnnnnnnnnnnnnnnnnnnnaaaaaaaaaaaaacctcttgaagatacaagtgtctctcttgatactagatcaaagagagtaatggaggcactaaataacttttattgtaattcatatatttctttttttggccagcgaacaaaggagaggagattatgcaaatgagaggtagagtcattttagattcaacccacaaatggatttttttccagtatgatattaatataaaatattcattaattttgttgataattaatctttatctgaaaatctaattaactatttttagtgtaatttttctttcaattatatttttttaatccacaagattcaaattagaaactttctttcagaaaattaaattaaatttcactaaaatgacttgttggtctcacaaaaatggattgaaagtaatggaatgagttttttttatatatatttttattattagaattagaatgacaaaaatatctcaatcacattttattacttatttagagtatagatgtcattttatacacacatgtaaagagagaagagagatcaaattacatcgatataactttgataattattatattatttcataactttcaattgaataatgttttcttcaaacttaccattggattgaaagttattttcacatgtatcacatgcaaaattttatattaattcaaaattatttgttactttgttcatataaattaaaatcaacttaatataaacatttcaaaatatactaaaatatgaatcatttgatttctttcttatagttcaattttgacaaaatttagtaaatacaatcttgataatatataaatataattcaacgattgaataaataaaaatcacatcttatattaatttataaaaatggtataataattatcaaaattatacaaggataatttcatccttccatatatatatatatatatatatatatatattcctttcattttatttctacttaacaacttaaaactttcctttcaatttctttcattaactaaatataccaaagaaaaaagtgctataacctataagaaatgcaaccaccattattgtttaataagaaaaagtaataaaaataatagatctgttaattttgtaacaaaataaaaactctagtaattaaaaaaatattttgtatgtttctttttaactaattttattcatatgctttaaatacagattttgacttctaccaaaatagtacagattttgatggagcccatatataatcctttcacatgaaattaagaagtcaaaatacattgatgcagatagtaactcaaaaaatgtttacaacatattaacaattgatttcatttttcttgtaatttatttgggaatcattgaagaaagaaaaaacaattagaatgtaaaaatcgattaacttcttaaaatcacttaaccaaaacataagttgaactacacatcaccctgcgccatgcgctggggtacacctgtttctgggccttttacatactgtttagtgtttgcacataagtctctagagaccttttctattttgctttatacaaggttgggctccctcagtctttccgtttttcccatggtcttctttatttataaattacataatctactttcaggctttttccaccctttttcacgaattatgttaaaaatcaattgcagttttcaactaccttacggggtgattgtcgccgaacaaagttaggcactaattttcctagtaatttttctccattcacacaacatttctcttataaaagcaaatttgggataaggaatctactaacaatgaacatttttatcaaattcactaataaaatataagtagatcaatcaatgtttaagcataaaaatagtaatttcaagtcgactgaaaatagaatctggtaaacaacctacaacttttggatgacaactgagttggctataccagcttgttctatagtctggtccaaatcagcgagttgtttgggaggaaaacccattgactgcagttggtaactgcttacacccccgggtcttgatgcatcaatgaatgctcgaacatctctgattgtatggtggtgattgaagcgagaaaccatgcgtgtgccatcagccaacctcagttggattgatgtcactgactgcgactcatctacaactaaacccatagttggcaatggagcagtacttggtgaagcaccggttgtttgaataggttcatcattgctggagctggtgctacctaaagttcttccaacaccctggaaagcacgttggcgtggcttcactggttcctgcataaaaattttgccaaaaggaaaaagaaatggtaaaaaccttaacataggatgatagatagatgcaaaaaactaaaaaatagaaaagggaatacagggtagtcttcatcccgccttgtgaggttgacatggacagcagtcttcctatcttctggctcaagttctttgggacattcggacttctttatgctctatattgaggtaaacaaatgattagcatgctctatattgggcagctttcacacgttgcagtgctgaaagcagtagtaactttagtgtacttgaaagagcttatttaaagcttattttatgacatgagcacttgtataaatatttgaaaaagctcataaaaatagcttgacatgttcatgaactttttttaaaaaaacttgtaagcttatttcaataagttattcaacttataagaaacaagctagccctattttatctttcattcaataagcttataacatatacataagtgcttatttgataagcacttaaatcctatctggataaacttttcaacagacattcataggagaaggaaaaaaaaaatgaattaagcttctctaataagttaagattagctcatgcccaacagcacaagtcaaaatcgatttttggagaagttaaatgagagaagttcaataaataaacttatgcacgaggttttaaattgcggctgtggtttcatcaattttcatgaatattgtggaaagttgcaacaaatgcggtcacaattgcagccacatacacttcaagaaaccttgatgttgcagccaaaatcactatcaccaacctcttcttaaaaacttatgtataacaaaaattttaaattcttatttttccttttttatttccttctcctatgaatcggcttatagaaaaaatttatgtaaacatatccttatttaataaacacacttaattaaactatttccccaaatgcacatacaccctcagaagataaacataagatatggataaaagcctacgaacaagagcttttggaagcaaaagtaatggcaaactacctccagaaaaggtgcgttttgcggatcattcaacctccgtagaggaccatcattgacagagaacccattcctccagaaagtgacagtgtgggtaacttcctctacacgctgaggagcagcagcagatggcaatctctctccagatagcaacctcgccgtgccactaaaacttgtcgacctcgacgagcttcgaggattctccggaggtgcatcaacagcaacctgcctcgcttgatcaaagatatcatccacattgttgttgttgctgtttcctctggtaggatctcgaacaagcatcccactgcatgtagcatcaaatatataaacacattacaacgaaaaaagccacattggatcttattatctcacaatcgtagtcttagaatatgaatttgggcctaactcaacaggttgtctctcacttatattctattttggtcatatcactagtaagatgtgaaatctctagcatacctcatttaccaggctagccgccacaactaaggagggccaggggtggttgcaattaaggcgactttccaacaattaatatgatcaatttacatggatacctcttttcgccgccggtgtagtactcgtcgggttcgaaatcgggatcggaatcggaatcatcatcgcgggaggagcgtttgagatcgccgagggtgcgaattttgccttggcggctggtggagggtttcttgccgatagacctgcgggatcggagctcgtagggcgtgcgattcggcgacggagacctcgaagggttgaagtccggggagtgagaatcggagggaggggaaacggagttggggtttgggtttgcggcgacgacgacgtcgtcgttttgagggatgagagggttgttggcgttgtcgagaaaagtcgaaacggcggcgtctaggtcgaaattgtggctctccaaaaagaaaagggcttcttgtttggaagaggaagtgatttcgcagaaggagttcaccaaagctgcgttaccatcgggattctctttctctccttccatccttttttttttttttttctcttcactctgtttctttctcacgcacacttcacacttcagagtcttttacaatgtcctacgttgtatatctatatatatatataatacacacacacacacacgttagactcacttgccacgcaatcatgcgtacgacgccgttttctacacttttcagttttcgctttatttcttctactcccacaggtcacaacggataccttgcgtggactgttgggaacccaaatcatctctaataaaataatttaaataatacaattttaataaaaaattatcaatttaagattatttgtaaacaaattatcaatctgggacagtaagttacgtccagaattaagcatgattggtcacgcccagatttaggcatgacctcaatcttcattaacacagcttttttaaaaaaaaaatatacaaaataaaaatatattacccatatcttaagtgagattatttttaagaatgatttatgagggataacatgttgaatgactatcttgttaagttattcttcaatgactatgatattaatcctaagaattactcacatcccgaggataataaaataatccttcaaacaataatttctaagagttattttgatatttgattttcttattttttttttaagttttaatctatcatttccatctttatttttaaattgaatttcaataaatttttaaagaaaatagcaataattaaaagaaatattgtatcacatataactttttttatcataaatttaaaatataatttatatgtttaaaacatttatttttataaattttagttttataaaaataaaggttttttaggactagtcttcctactacgtgattaattaagggtcaaattttcattgagagatgtttctatatttaatgttggacaatattctgaatataattgttttaaaaaaatattcgtgaaaaatattttttattttattttaattttctcacaatttttgctctcatttattacaagtaattattgtgaaaatctacatgacttttggtgtgtttttcggtaatgtttgtgaattatgaccatataatttgactttttcaattataagggctgagacttatctaagatgtctcctggatttaaattaaaggaagacctcacctttttacattataatttttttacttcagaaaaaataaatctgcaaactaaaattaaaaaaataatttaagatattataaaatatgatgttttcatatattataattgaaggaaagactttgcatatctaaagaagactaatcatccaaccacatgtctgacaccggtaatttatccttattagttacatgttgtattttacaatcatatatggtatcccttaattggcttacaagatcaaacataagacaattgatcgatattacatatggaccataaggaagccactgaagtaaaagacaattagttcacattatgtgagacggtaaaagaatttcccatggctatgttttgctgaaatttgagccaaaggtgacttcatgtccttcttactacacgtgacaggagcaaaagaaaaaaaaaaatcctatcatatatacattgtttaaggattgtttggtatttcctcttttcagttttcacagctctagaataatgttgaatctcttgatctagcaaaatctgaaacagaaacaacatgcattatttaaatagtaatgcttacaaaatccatagaagtgcactgaacaggtaaaacacacaaacaccaaccaaaaagaaatgaacctttaccttcaacgtaagctcaagttagaggcagcagctgcatctataatgaaggatataggttggcgagtgttggtgattttagtgtcatcaatggattttagtagtaatgtgatttactataggccaatgcgattacgcgttaagctttggaaacgagttagggtagtgcggagtgcacgcttgttgagccaacgcataattgaccgcgattacggtgcggggttccatgttgaattgatctcttattcatgtgggggattgttggagttttgtttaaactccatgggttataaataagaggcggttaacaattcaaaataataactactcctaaccgctcttgggaaaggttagaaaaataactactcccaaccgttctgatgaccaacggttacgatggttcatcgtcaagagttgcaatgtttggaaaagccgaacagccaagagttgtattgtttggaaaaactcctatataaggagtcatttggcctcagatttcaaagaatacgaaaatcatactttctctctacattcctgatctgttctctattgccagaagcagattgttcttcaagaattatcccaacaaggatttcgtgaacccaggcaagaatagggtcgaaatactttgttcggaaagtgtacgaacacgattctttgaagttatccaggattatcatacccaaattttctaacaaacgaacaaagtattttctgataatcatggatggaggaagcgttggaggaagcacagtcaaggacatgactactaatttcggaaagttggacaagtttcaaggacaagacttcaggcgttggcagaagaagatgcatttcatgttgacaacattgaaggtggtgtacgtcttatctactccgattccagaacttcttgaggaagataccgttgaaaatataaggcgcagatcaaagtgggagaacgacgactacatatgcagaggacacattcttaacggtatgtctgatcccttatttgatatttatcaaaatgcagaatctgcaaaggaattgtgggattgtctcgaatccaagtacatggcagaggactcgtccagtaaaaagtttctggtgactgatttcaacaattacaagatggttgaatcaaggtctgtcatggaacaattcaatgaactcctccgaatccttggacaattcacacaacatggattgaagaagcgttggaggaagcacagtcaaggacataactactaatttcggaaagttggacaagtttcaaggacaagacttcaggcgttggcagaagaagatgcatttcatgttgacaacattgaaggtggtgtacgtcttatctactccgattccagaacttcttgaagaagataccgttgaaaatataaggcgcagatcaaagtgggagaacgacgactacatatgcagaggacacattcttaacggtatgtctgatcccttatttgatatttatcaaaatgtagaatctgcaaaggaattgtgggattgtctcgaatccaagtacatggcagaggactcgtccagtaaaaagtttctggtgactgatttcaacaattacaagatggttgaatcaaggtctgtcatggaacaattcaatgaactcctccgaatccttggacaattcacacaacatggattgaagatggatgaaacaatatctgtctcaagtatcatagacaagttgcttgggggaggtgccatttcatgggcttccaagaagcaaacatgtataactagttctacaatggaatctgagtttgtagcattagctgctgctggtaaggaagcggaatggctaagaaacttgatatatgagattccaatatggcctaaaccgatatcaccaatttctatccgttgtgatagtgctgccaccttggctaaagcctatagtcaaatatacaatggaaaatctagacacttgggtgttagacatagtatgattagggaattaatcatgaatggggtgatatccattgagtttgttcggtcgcaacaaaacttagctgatcacttgacgaaagggttagctagagacttagtaaagaagtcggtaatagggatgggattaaagtccatttaaatattctaattatgatatacccaattcccttctaatacaacgttagaagcagaattcaatgtggaaagattatagttagagattggagcaattatgtttgtcttcccaaggtttttgctcagacctgcaagtgatggttaggttgaagtatatcttcttaatggttcttttgaaaaattgtaaaagcaggtacaagattaaaaggatcacctatgtgagcatgaagttttgccgcttcaagaagtttggatttggcttcctatatgcttacgaatggataaggacacatggcttgtaaagtgtcaagtatgaatagtagagtgttgtagaaaacatgtgtgtacaatatcttcagatattcaaataagttgacggattcaatcgtaacgataccctgattcttgaatatatggaatgtgtatttgtactaagatgaaattcaatcgcaagacatttcatttatgcatttgtttgatcgttatactgagtagatcaaggattacactaaaatgggggggatttgttggtgattttagtgtcatcaatggattttagtagtaatgtgatttactataggccaatgcgattacgcgttaagctttggaaacgagttagggtagtgcggagtgcacgcttgttgggccaacgcataattgaccgcgattacggtgcggggttccatgttgaattgatctcttattcatgtgggggattgttggagttttgtttaaactacatgggttataaataagaggcggttaacaattcaaaataataactactcctaaccgctcttgggaaaggttagaaaataactactcccaaccgttctgatgaccaacggttacgatggttcatcgtcaagagttgcattgtttggaaaaattcctatataaggagtcatttggcctcagatttcgaagagaatacgaaaatcatactttctctctacattcctgatctgttctctattgccagaagcagattgttcttcaagaattatcccaacaaggatttcgtgaacccaggcaagaatagggtcgaaatactttgttcggaaagtgtacgaacacgattctttgaagttatccaggattatcatacccaaatttttctaacaaacgaacaaagtattttctgataatcatggatggaggaagcgttggaggaagcacagtcaaggacatgactactaatttcggaaagttggacaagtttcgaggacaagacttcaggcgttggcagaagaagatgcatttcatgttgacaacattgaaggtggtgtacgtcttatctactccgattccagaacttcttgaggaagataccgttgaaaatataaggcgcagatcaaagtgggagaacgacgactacatatgcagaggacacattcttaacggtatgtctgatcccttatttgatatttatcaaaatgcagaatctgcaaaggaattgtgggattgtctcgaatccaagtacatggcagaggactcgtccagtaaaaagtttctagtgactgatttcaacaattacaagatggttgaatcaaggtctgtcatggaacaattcaatgaactcctccgaatccttggacaattcacacaacatggattgaagatggatgaaacaatatctgtctcaagtatcatagacaagttgcctccttcatggaaggatttcaaacacaatttgaagcatggaaaagatgacttgtctctggtacaacttggaagtcacttgcgcatagaagaatctctaagggcgctggagggtgacaagggaaaaggaaaagaagttgctggaccctcgattaatatgatcgaagagggcggtaagaacaataacaatagaaacaaaggaaagaagcgtgctttcaagaacaccaaaggaaatttcggctccaaactgaaaccaaaactagaatgttggaagtgtggtaaaacaggtcacttcaagaaggattgccgttatgggaaaaaacacaataacgcgaatgcaagtggttcgggaaaagggtctaaggaccaatcccaaaacgaaggatgatgctatcgcgtggtggattgattctggcgccacaacacatgtttgcaaggatcgtttctggttcaagacttttgttccaatggaagatggttctgtcctctacatgggagatcatcattttgatcctattgaaggcaaaggaagcgtggtgttagaattcagttctggaaaaactattactttgtttaatgttgtatatgttcctaaattacgtaagaacttaatttctggtcctgtattaaataagcttggatacaagcaagtgtttgagtccgataaatttgtactatcaaagtctggtgtgtttgtaggatttggatattataataatggtatgtttatgatgaatttgaatggagttcctaatgattctggttccgtatgtatgtctatttcgaatgttatcaattcgtctttatggcatgctcgtctaggacatgtacattataaaagaatgcgtgaaatgtctaaagatgatttaattcctgtttttgatgagaatatagaaaagtgtaaaacttgcatattaaccaagatcactaggcaaccttttaaaaatataacaaggaaatctgttatacttgaattaatacatagtgacttatgtgatttgcatgctactccatcattagggcataaaaagtattttatcactttcgtagatgatgcatctagattctgctatgtttacttgttgcatactaaggacgaagctttagataaattcaaaatttataaaactgaagttgaactgcaacaagatgtgatgattaaaacattacgaacagatagaggtggtgaatattatgatcctgcattcttccaatccgtagggatcattcatgagactacggcaccttatacacctcaacaaaatggtgtggctgaaaggaagaatagagctcttaaagaaatggtgaatgccatgttatcttactctggtttgagtgaagggttttggggagaagccatgttaacggcttgctatttgttaaatagggttcctaataaaaggaataagactaccccatatgaactttggtataagaaaagacctaacttaacatttctacgtgtttggggttgcagggccgtggttagactcccagaccctaaaaggaaaactttgggtgaaaagggtgttgcttgcatctttgttggatatgctgagcattccaaggcttataggttttatgttatagaacctaatgactcgatttctattaacacaattatagaatcaagagatgcgatatttgatgagaattgcttctcttctacgcctagaccaaagaactctataccgatttaatctctaaaggatgatcacttaaatgatgtaccaagtgagacaatcgaacctcgtagaagcaaaagagctagaaaatctaaatcttatggttctgattttcaattatatttagttgaaggatcaaaggatcagattgatgcacaatactattattgttataatatagaggaggatccaagaacgtatgatgaagctatgaaatctcgagattctgttttttggaaagaagcaattgacgaagagattggttctatcatggaaaacaatacttggatattatctgatttaccaccaggttgtaaacctttgggttgcagatggattttcaaaaggaagatgaaagtcgatggtacaattgacaagtttaaagctagattggttattcaaggctttagacaaaagaagggattgactactttgatacctatgctccagttgctcgtatcactacaattagattgttgattgccttggcggcaattcacaatttagtgattcatcaaatggatgtcaaaacagcattcctgaatggtgatttggaagaagaagtgtatatgaagcaacctgaaggatttgtaatgcctggcaatgagcataaggtgtgtaagctagttaagtcattgtatgggctgaaacaagctccgaaacagtggcatcaaaagtttgatgagattgttttgtctagtggtttcattctaaaccaagctgacaaatgtgtatatagcaagtttgataaatccggtaaaggagttatcatttgtctatatgttgatgacatgttgatctttggcaccgaccaaaatcaagttaataatacgaagaattttttgtcatcaaagttctccatgaaggatatgggagaagcggacgttatccttggtattaagattaaacgggagaataaggggattgttattacacaatctcattacattgagaagatactcaagaagtttaatcatgaagattgttctccggtaaatactcccatggatccgggagaaaagcttatgctaaatacaggtaaatctgtggatcaactcgaatattcaagagcaataggctctttgatgtatgctatgattagcactagaccggatatcgcttatgcggttggaaagttgagcagatttactagtaaccccagtagacatcattggcatgcgataaccagggtgttcaagtacttgaagggaactataaattatggattgtcatatgtgggatttccttcggtgttagaaggttattcggatgctagttggataaataatgttgaagattcatcctctacaagtggatgggtgtatttgcttgggggaggtgccatctcatgggcttccaagaagcaaacatgtataactagttctacaatggaatctgagtttgtagcattagctgctgctggtaaagaagcggaatggctaagaaacttggtatatgagattccaatatggcctaaaccgatatcaccaatttctatccgttgtgatagtgctgccaccttggctaaagcatatagtcaaatacacaatggaaaatctagacacttgggtgttagacatagtatgtgtaacaccccaatatttcaatttattgtgtatggattaatagaaatattttaaggattattagaaattcaatctataagttgagtgacattttgtgctagatttcgtagattccgtgaatatcctaagcttccgtaaggccaaaaagattacataaagcaaaacagaggaggtgcaacaagcaaaacaggctgaagcccaaaaacaagaggcccaggtacagttagctcgcccaggcgaccaaatttgccttggttaggtcgcccaggcgagcaggtaatggcagacagcctgggatcgcactcagggtcgcccaggcgaccaaaaaacactctgaagggtcgcccaggcgaccaaggacggccagaactcccctataaatacccctaagcattccaaacattcctcacaccatttcctttctttctttgcttcctcccttgttctggagctctctttgagcctaggaatgcttggtttggctttggttttcatccaagagctattctaaaagcatggagatgatcctataagttatttttgagtggggttaggatagggagaggaataggtggtagtgcggaagctctgctcagataagaaggaactctctcaagtgaagaaggattaagggagccaacttgttcaagttctagaatcggctaaggtatggggtagttgtgttaaattaaatttagatatgaacctctgcttaaattcctatttatattaattaaggtggtaaaacggaatgttagataatctctaagcaatttataagtctttaatttgatatctaaaggattagaattatgttcatgatttattttatagatgatatatatatgtttctgaatgaagattttatacttcttacttgtttttctaacaatatgtcttgaggtttaaactttatacatggtcgttgaaatattttctaatggtttgaaatcttcaaattagtcattgtatttaattatattgggatcttgaaaattcttgtgatctattttaatggtgaactatttgatgatgttacgacgatacattgtgataaccatgtgatgacattgtgatgattttgtgaaaacattgtgatgattggaaaagtgaatcatgtgatgttgagatggaaataatgagaaaagaataattaaacgatgaatcattcatgcatttccatgtgcatctacccagtagggtagaacttgtgatgatgcgatgatcctcgtaaagaggtgttttgtcaggtaaccaaactgagttccatacgtgtttttaacttgggggtagttgagacagtggggaaccacaataccatgatgatcacatggatttgagtgagactcctatgcaacactgggctaccctgacgggatggataaagttcgttccactaaggtgagagtggggttatctgacggtggccacaattgtgatgttgagaagctgagatctcagtcatgcatcctatgataagataatcatgcatttcatgacaatgacgtttatactctgtataggtgtttacatatatttattattcggtacgttgatatttaaattttgtttatcatagctaaccctgtgttgtgtctggtggatgacacctgtgacgaccccaaattaattgggcgagcagatgaacagtaagcacgatcaagggatgatgacttgcgtgaagaaatgatgaagactgtgtgatgatttctgctgtgatttgctatgtcatgtatcttgatttgatgacatttggattgtaatattggaatatgtgaaacaattttcttatagtattcatatctattttgaaaaaaaattataatatttcctatcatttacaaactcatttgattattgtagaactttcagatgaattcttatttctaaactgagttttaaataacaaagactcttttagaacttttcgttttttcggaaaatttccgctgcaagtaaaataaatacgtaataaatacgtaatagttgaggtgttgcagtatgattagggaattaatcatgaatggggtgatatccattgagtttgttcggtcgcaacaaaacttagctgatcacttgacgaagggattagctagagacttagtaaagaagtcggtaatagggatgggattaaagtccatttaaatattctaattatgatatacccaattcccttctaatacaacgttagaagcagaattcaatgtggaaagattatagttagagattggagcaattatgtttgtcttcccaaggtttttgctcagacctgcaagtgatggttaggttgaagtatatcttcttaatggttcttttgaaaaattgtaaaagcaggtacaagattaaaaggatcacctatgtgagcatgaagttttgccgcttcaagaagtttggatttggcttcctatatgcttacgaatggataaggacacatggcttgtaaagtgtcaagtatgaatagtagagtgttgtagaaaacatgtgtgtacaatatcttcagatattcaaataagttgacgggttcaatcgtaacgataccctgattcttgaatatatggaatgtgtatttgtactaagatgaaattcaatcgcaagacatttcatttatgcatttgtttgatcgttatactgagtagatcaaggattacactaaaatgggggagatttgttggtgattttagtgtcatcaatggattttagtagtaatgtgatttactataggccaatgcgattacgcgttaagctttggaaacgagttagggtagtgcggagtgcacgcttgttgagccaacgcataattgaccgcgattacggtgcggggttccatgttgaattgatctcttattcatgtgggggattgttggagttttgtttaaactccatgggttataaataagtggcggttaacaattcaaaataataactactcctaaccgctcttgggaaaggttagaaaaataactactcccaaccgttctgatgaccaacggttacgatggttcatcgtcaagagttgcaatgtttggaaaagccgaacagccaagagttgtattgtttggaaaaactcctatataaggagtcatttggcctcagatttcaaagaatacgaaaatcatactttctctctacattcctgatctgttctctattgccagaagcagattgttcttcaagaattatcccaacaaggatttcgtgaacccaggcaagaatagggtcgaaatactttgttcgaaaagtgtacgaacacgattctttgaagttatccaggattatcatatccaaattttctaacagcgagcttggagacaagcacctatatcaaatggaagcaacctagaaccataaaaaataagattaactccaggaaggattgcttctttactatcattttcttttggttcagtttttatcgtattggttgtaacggcttcaagggattctttaattggttttgtggcagcttcatgagcaggaagtaatgtgtatgatctgcatgcaccatttaatagtagacttgggatgattaggaaatcaagattgtgagccatacagaaaaatatctttttgattattgtttgccaagatattggtaatagaactttatctaacaaaaaattaagaacctttaagcatagaattgatagaaatttaacaacaaaactaagaaaattgccatcacagctcaaaacttcattttggcaatgttgtcgattaactagttttaatctctggcgcacacttaatgcgccagaaatgcgagaaagatccactagtgaattccatcttccactggcagggtccataaattgtccaaaagcttgctctttctggtaaagaagctttgtaatgggacctgttgattgattggtaatttggtacccatcacaaatatcatgcaattttttccttaagttttgcatttcatcatagtgttcaccaaatgagccagattgaagcaactctgatgaaactatccttctacatatactaatgcacaacgttggactaaataatggcattccaaattcctcactcaatggcacccattcatatttctcttctgaataaaattggtctgattttgttccgttaaataatttcaatagtctaatataaccaacagtccacaatttcattttgttggccaaattggtcaataaagaattcaacttagaatcttcctcttcatttagtcctaactcttttcctacagagggaattgatccatcggcattcttcaagggcaaagggatatccaaagtaatcaattttccatattcattaagatcacatctactaagaggcagcaccaacacagctgaatgtttaagaagtgaatttaagcactgcaagaggatacttcccttcactaaatttcctttaagcttcctttgtaaccctcctattgtggaaccatcccaagaccatataagggatttctcacaacaagccaatggcgcaggaagcaagcacaggcactgtcctttcatcagaacaactgatagagggccactacctgcagttgagtataaaaccgatttcatccaaggactcggaagaatatgtgggaggaccaaaatgaactactgatgtctaggaagaattgttgaatgaggaagaggcactatggacacaagtataccatagtcgcgaagaaacaaatgatcaagagttgctggtgcaagagaagccaaactttcatagcgaagatacacgatatttcattttcctttttagcattcctgtcttaacatctgaactttcaaatactgctagtttctcattacaatcaaattttgtgtgtgccttgtcagcttcgtgaatgtgatcactactatcctccaaagtaatggaacgagtttcatcatctattccactaggaacacggtcggtgtaaatagaagcctccacaagcttctatgaatcagaatttattagatcctcattatttatcagtttctaaaacactacagtctcctgatatatcaaccaaagaactttcagctatctcagaacttggcccatcattacttgaggtaatcatactcagcttatcagaacttccctcttcttttatgctggtaactattcaacctgattgtagacactctaagacacaacgtagactaaataaatggttagcaaattcctgtaattctccctcatatgttgcaccctccaaggtactaagatccttgcaaagatcagcaatgctgccataacccaatttccctgcttcatagtgtgtaacagcatgagatttcaggcctgcaaagtttggcaagaagtataatttagtcaaacgcaaaaaccaattttgagacacacaacaagtcgtaatacaacaacaaagccttatcccactaggtgagatcgactacatggatcacacgacgtcattcagcacggttaaaaatcaaagtttcagaaatattattaagtaacaagtcgtaatgagtagtcaaaattttattttcttcttagtatttgtagagaaatttatccaagttgcctttaagaataataataactattaaaaaaaaataaaactacaggaaataatttaagcttgaagaggctaagagtgaagggtataaacctggtgaaacagatcccatcataagataggatgtaatattagcatcaactatgaaagcaacacaagtgtaggaagaacgaggtccattgtttcctgaagctgaagcatccccttgttgaatggagtcattagcataaagagtattctcataattttgactagcaacaaacgcatcttcatcactagttgtacttgcaacaggagatgcaagtatagtaactatagttgaatctccaataatagattctggatcaagtacttttgttgcccatcccaatcgacacacaaaagcagcagcagcttgcaactgtgacaaatcagcctgtagggttgttgccaagtccctaactgttacattttcatttgaaactacaaaaactgcatacaacaacctgaaagaaatagctctagcattagggtcaaactatatagaagtaagctatttgaacaaaaatgtggaaacacaaactgaaacaactactttactcttcaataggatcttcataagactgctccctgttggaaacaaaacaaagttttattttttaatattataatttcaaattttatgaattaatttgataaaactttttagataaactcattgggtagagagtaaggaattaattcttcgatataattcatttaatttgataaaacttatgtacgtaaataaaacattaacttatcattaatttcaattgtatagaaataaatatttatttaagacaatacacatattaaaatattacttaaattataattctgtaaaaaacatattttattattgattaaatttaataaaattaaaaaaagaattaaataaaaagtgagattcataaaaaattataaattttaatttaattaataataaaaatatttgtttttaggacaataaaaatatatatttagaagagcatataagagaacgtgtgactgacttttctcttataaaaaataaaaaataaaaaataataaaattcaaatatcaaaattgggccacctacatcatcagctttctctcactagggctaatttcctgtgaccaattctctctttttaacttcactctatttttcttgcattttcttccactctcgtagcatcttcttactcttattctcaatgtaagttctttccacttcttcattccgtcaatttcttcacgccctagctcatgcacccacaatccgtgaatttatgagtacaaatttcactgatgtttttcgtggtatgggttttggattagggtatttgggtatgcttaaatcgcaccctcccacgtgtttcgttacttgttttcgataatgttattgatcgaggttgtgaaagtttgattcttttgtagatagttggggttgggttttttctagatatgattaaacagatattcggtaaaatacctcgcaaaccctcaaaatcatctcacaataattcaaacggggaaggagggttcaatgatggtttctcactgaactcatcttctaataccctcttgaaatccaattcagtttcttcaaaatcttcaagttctggttcagttgggtctcgttctgggaatgagactattgctcaacactattcaaaccaatctaagaaattagctcctagtacaggttcagtaatggcttctgcagcttatgaggctttgcctagtttcagggatgttcctagctcggagaagcagaatctttttattagaaagttgaatttgtgctgtgttgtgtttgatttcaacgatcctgccaagcatctcaaagagaaggacgtgaagcggcaaactctacttgagcttgttgattatgtttcgtctgtgaattcgaagttcaacgagtttgcgatgcaggagatgaccaagatggtggcaaccaatttatttcgcgctctgccttcttccaatcatgatggaaggttggcagacatgggtgagcctgacgaagaggaaactgttttggaaccagcgtggcctcatctgcagattgtctatgaatttctctttagatttgtggcttcaactgagacggatgctaagcttgctaaaagatacattgatcattcgtttgtgttgaggctgcttgacctttttgactcggaagaccaaagagagagggattacctgaagactatcctccaccgcatttatgggaagttcatggtgcatcggccattcattagaaaagctatcaacaatatcttttacaggttcatatttgagacagagaaacacagtgggattgcagagttgcttgaaatattgggcagcataattaatggttttgctttgcctttgaaggaagagcataagctgtttctggcccgtgcattgatcccgcttcacaagcctaagtgtgttgcactttatcatcaacagctttcttattgcattactcagtttgttgagaaggacgtcaaactagctgatactgtgataagagggcttttgaaatattggccgataactaatagtgcaaaggaggtaatgttccttagtgagttggaggaagttttagaggcaactcaagcagcagaatttcagcgatgtgtgatcccactatttcgtcaaattggtagatgccttaatagcttacactttcaggtgcttacaaaattcccccatatttattttttcatttgtgatatattctgtctgcattcattttattagcatttactaacacctgtgaccacagctctctatctctatttctatgttattcatttccattcccactttgcttgtcttagctatcttagatgctatcattctatttatctaatatttgatgattacttgtcgaaactgcaatgaatttaacaaatgtaagcagctcaaccatcagatcagagcacttgtattgatactagaaagccaaactatgttacattagtattacctttttttcattgccatttctttttcttttgagtaaatttcataatctacctgaggttttgtataattacacaaatctcccctgtttttttaacatttacagtaatttccctttaggagagcctgatgtgatatttttcaaacaattaggggggttccagtgtatacttttaaataacttaagggggttaatgcaatgtataaggggatgcaatgtatatttttaaataactaagggagattagtgtaggagtagaaaaaggcaggggtgtttgtgtaatttcatgaaacttcagtggtagttagtgtttttactctttttttttttttggagttgggttcagatgtggcactgctgaacttttttcataaagatgttgtgactcgacattccttcttcctttcattattatttggatatcttatttatgccttatgaaataatagtttaaatctcacaaattttatgtcaattcataatttcattgattattcaatttttcttgaaagttggacttatgttgccaacgatatattatatatggttttcttttatgttaaatctcagaaatttgatatttattcataatttcatatgaaatgattattggattttgcttgaaagttgaacaacaaaatattttatatggttgtcttttatgttagaacttgtatttgtgacaactaaagattttgtagatttgtgttctgtgttacaagctgcagttctacaatacaacatactttagttttattatctggaatcagtctcaaagaattagatttgatgttgacttgattttgttggcaggtagctgaacgagcactgtttctgtggaacaatgatcatattcgaaatttgatcttacaaaacagcaaagtgatactgcctataatctttcctgctatggagaaaaatatacgggaccattggaatcaagctgttcagagcttgaccatgaatgttagaaaaatattctctgatgctgaccaggcactttttgatgaatgcttgaagagattccaagaagaagaaatcaagaatagggagaagcaaaaaaagcgagaatccatatggaaacaactggaagatgttgctgcagctaattctgtaagcaatgaggccatccttgtctcaaggtttgtgtcctctgttgcaattgctaccagtgcgaatcaattggcaactgcaggtggttgagagccatcagagatccaaattgtttgttctgaccacatgatgaggaacaaaggtgaatggggttgatgtggatatcaggctgctccttgtttctgggctttttcgtctccatcatctgttctggaatcttgggttgtactatgtatcataaggaatgtagtttataataggcagtgtttatttagaagtctagccattgagattatgcagtgatacaaaaacaatccttttcttttgccatatttatgtaattttaacattagtaaaatttctatttcttttagccttttgcagaaaaagatctgaacccattgttccctctggcagttatttgttcttcgctggctgaactgcttgtcacagtggatccaattttttttttttctttctagaggggggtcattacacgttcggagtttgcgcttttcattggaccttttcttatttactacttaacctttgtgggttgggttctttgggatctatgtctcctttccaaatgaatacgtttgctcttatgtttataacgagatatttcttgtttgctcttacgtttataacgagacgtttcttgtactcgtctgcatttttttaaatatttttatagaaggctgtaaaaaacaaattgaatctgtgtgcttaacactatgatgcacttactgcagagttaaatgttccactttggattatggacatttgtgatttcacatcctgcttggaagacaaaaatatgaagttggtcgatatgaacttatcgggaagtcttgccttgcagaggcagaacatgaaaaggatacaacagaagcatttaggactatttcttttaaatgatggcaaagtatcacaaacattcaaaaatattggtaatacatttagaactggaaaactagaactttaaaaaacatctattgcataaaacatccaaataacatgtgcatgttacttttaagtggttaccaagcatcatcttctcatcaatgatcatcaccatatgctctgaaactataacgttcttgatatggatcattgaaccagaggtcagcttcaaaccactttgggtactggaccaagtctccggccacaaattgcatgaaacgctcgcttccttcaggcacaactctcacttccccttcttctatgtacaccagttggtctacctgccagtcccaaggcaacctgcttttcccagtcttcaacactgaccattttgaaactccaagctcggctagtctctcaggaggaacttttctttccaccttcacattgtacaattcctccaaggatttctctatcctcattgcttttatgcagcaccttcctttagaagcattaactgactttctgaaacccctggaaccattgttgacaggagaataggtaatggctaatgttgtcaacaagcttgccatgcctgttaacagtttacaataaatgagcttcacttgcaaactagcacaaatctgcaagaaaggtttcaagaaattcaaagacttccaattttaatgatgagcattgaataaaagttccaacaggaaccaaccaacacatttctctcttaaattaccatgagtaacctcagttaatttttaactgcaaagggggaaaaactgacactataacatagccttccgttgattctatagtagcacgtgtagttatgcttccctatgtgggtttgtttgttttatttgtgtgttgtgctgtgtctgtttccatcagatatggctagaaaaggtaacaagtttccaactttttttttcttgaaattttgaagggtgaggcttaccttacctagtacctacacactttgaaacccacaacaatggaatggaaatggaccagaaaaatgaataacaattgaagttcagaaaatcatcaatgttcacttccggttgtttttagtcctaattgtcattcactcagaagagatatcatacactaaatacacataaaaaaaaccttcagtttccaaagcacaccaatcaattacaaatgtaaaaacactagttttctaattagggtttggtcaagacccaattcgtgaatgtgaggaaagtgattaacatacttgatgagctccgatgttttgacttctgaattgaaatgaacaccgactaaagagcagaaaaaaaaaaaagatcgaagtttttatcggttgaaaagatgcgcagggttgaagatgcagttggaggtttcgcttcgtttcaaccgttaaccgataaaccctgtgagaacaggtgaggtttatcctcaaagttgaaacctttattaagtagtaacagtggagtgccactctgttgcccacacaactatatgtatttaatacgacctacaaatatttcgtgaaaatatgttaacaaaaagtattaaaactcatattattaatatatttttttcaaatgtgatcatgcaaaacatatgaaataggaagcaagcaaataagaaaataaaataaaatagaaataccaaatttttattattatttgttcaaaagaggaaatataaatgtattttttttgttgtgaaatannnnnnnnnnnnnnnnnnnnnnnnnnnnnnnnnnnnnnnnnnnnnnnnnnnnnnnnnnnnnnnnnnnnnnnnnnnnnnnnnnnnnnnnnnnnnnnnnnnnnnnnnnnnnnnnnnnnnnnnnnnnnnnnnnnnnnnnnnnnnnnnnnnnnnnnnnnnnnnnnnnnnnnnnnnnnnnnnnnnnnnnnnnnnnnnnnnnnnnnnnnnnnnnnnnnnnnnnnnnnnnnnnnnnnnnnnnnnnnnnnnnnnnnnnnnnnnnnnnnnnnnnnnnnnnnnnnnnnnnnnnnnnnnnnnnnnnnnnnnnnnnnnnnnnnnnnnnnnnnnnnnnnnnnnnnnnnnnnnnnnnnnnnnnnnnnnnnnnnnnnnnnnnnnnnnnaaaaaaccttctcccacattgaaatggaaggagcaaaatgaaaaattctctctttttgattttaatttcttaataagtaaataaattttcataaaacaaacaaaatattgaaaattaataagttttatattaaaaaataaaataaaaatattattgtttttaaaattaattaaaattctaattaatctacaaaagtttatatagattatttatttcttttcactatatcccattaataatttaatattacttctcatatcatatctaacaaagatatctaggggagtaacttggacatatctaatataattaagcgaaaaatagaaaatagaaatatagggaaggaaaggacacagacagttttggtggttgaacgtgtcaacttgtggtgcgcaatttagttgccttttcaattatgataatgataattgatcaatcaaacagagaatagagaaaaaaacagttgcttgctttacttcgattactctcttgtttatctaaattttttgagcttcatttgttatgttaattcttcggcttcaacccattaatggaatatctcagctctcggtggggacttcattcccacacaagaaatgtaaccgaagacccctccttttgagatcacaagctgttccctccagaacccaggtaccaattcttcactgtgtcatgccacgttgtgttttctatgcaacaagtccaaataaagatgatgacattttatttttaatttaattgtaatgcatgatagtgttaaggtttctacactaacattcaatcatggattaccatctatgataaaattattgacttttgtaataattagtcatatttaaggtgttttctagtttgttgacacaaaaaaaaaattacactaaaagtgtaccaaaatgaaactcatttcttttacttttatagaggataatggagagtgtttcagtgagtggagaagttggtggtgctggtggagcttactcatatgaagccttgaaaagattagaccagctatggtcaagcatatgctcctctcaagaaggttcatgtcattcaatgattcttataccctttaggaaatgagactattttatatttttgtaatcttcttatgtatacattgcagttgtgcaagagcctcagcaagttgtctctaccatcccaggcttgtttggctcatctgatcttgctgacaaagcagagggatcatacgatgtgttagtgtgtggaggtactctggggatcttcattgccacggccttgtgtgctaggggtcttcgagttgccattgtggaaagaaatgtgctaaaaggggtaatttcagtttcattgactgagaaatcagcattcaatcctactcagaaaagagtcgataaattctttgaagggtcggatcaattttgagttgtctgtgttattttgatcattagagagagcaagaatggaatatatcaactaaggagctttcggaacttgtagaagttggagtcctggaagaagatgacattgaaagagccacagcagtaaaattcaatcctgtaattcctgaacttcttcagtttagtttccaatctctatgtagcaagaatcatctcggttaggtatttctccataactaatgtcttcaagtcactttgaacatacatcacatcattcacatgcctaaacacagtaagagatggataatgaggtcttgtttgttacaaagaaatgacaaaattcatagagcactgcaagatgaagttatctaacaaccaagggatattatcaaacagtataaaaaattagcatgttatctacttagaaacagagtaaatttagttgtcaatcccaatagaaaagacccataagtgtttaattttgtataaaaacttataaaggagaaactcattcaagcttacaaggtagagaaaaatgaaatacgtaccctggcagtcttactctgacttttgttacagttagataaatgttttattattaatatcctccatgaatattaattgacgatactttcttgtgttatacatgtgtgtctttgaagtaattacagaatgcgatttttatattacaattacatacttaagattgaatcaatgaataattttcatcctatttcaattcattcattttttttttcttgtgcttaaaaattaagaatttctgaattttcatgtaagttttgagttctcacaacatgaccattgcttacatattaagaagtattaagttcagtgcttcaatgtaatttccaaactgcttgattgttttttgttcctcaaagaacattcaatcaccaatagtttgtttctcctataggcaaaaaagctgtatcacaaatggcataactatgtctcaaatgtttccttcaagccatgtcttctcttgtaacctctctaggatttatggctcctactcttccctttaatttatttttcactaacttcactttggcaatttcatgaactatgcagaacagatgtggattcgaaaggaaaggggatatctgggtcaacgacatacttaatctcggtgtttcgtgagtctcattcccataaactaattcgatatacctgtaaataaatataataattgttttcttctatttcaattatcaatgaataatttaatctttgttcttatctagttaatatttttcttttattttttgtctggcttggcaatgaacaatatgcggtcgcagttgcttaaatttagtgcatgtttgaattatttaattttttggagaaaaatcacttctttattcaaaatctttctaattaagactttgattataatataaatctattttaaatacaaaatgagctaatatgatctagagctatcaaaatgggcccaacccataggtcaactcgttttggccgcataaattggtgggttggattacaaaaaagttggctcaccaagaccccgggtcatttggacccggctcacttaacccgcaacccacccgggttggctcgttggttgcacaaaaaaaaagataatggaaaaaatgaagatgataaagatgaaattgatttgtcaaaccatgattctaatattcttcctagacaatttaatattgatgattgagatatcaaaatttgacatttgaggagttagattggtgttttactattttaatattgttgaacatatttatatttgtttgagtttcatttacatttagtttgaggttaagtttgatgcagtttgtaatatttaaatttatttaaattgatttaatttgcatttttctacacttattttgtgattttttaatatttttttgatttttttaaaaaatttaaagtgaaccaacccgcgagccagcttacgggccaacccggataacccaccaactcggggtgggttgagccgggttggcaaaaaactaacccaccactaaagtgagccaacccagcccgactcattttttagccaacccatggtgggccaacccggatgggccgggttggcccattttgacagctccacttaattgttgtattttgtgtaattccttcaagagaggacaggaaatctgctgtagcaaactggatatagaattactaagaaatggcaagcagatgaaaaaaaaaacttgaattattatatgatgaatgcgcttccattagtactattgcacacaattttgaatattatctagacttggtgactctcagaaacatgcattttatttttactataggcgcagagtttacaattatgtactttgagtataaaattcattattctgttgaaaatcataatcatttttgctatttgcaattgcagacctgcaaagcttatagagattgtaaagacacggtttatctcccttggtggagtcatttttgaggggtgtggcgtctcttgcattaatgtatatgaggatgttgctgtgagtttaccttaacttttagaactagttattctagtgcatggctttttcattaagcgggggcttcaaacttagaagtcgtgtaacgtgacacgattcttttttttttttttttaatttaaaaannnnnnnnnnnnnnnnnnnnnnnnnnnnnnnnnnnnnnnnnnnnnnnnnnnnnnnnnnnnnnnnnnnnnnnnnnnnnnnnnnnnnnnnnnnnnnnnnnnnnnnnnnnnnnnnnnnnnnnnnnnnnnnnnnnnnnnnnnnnnnnnnnnnnnnnnnnnnnnnnnnnnnnnnnnnnnnnnnnnnnnnnnnnnnnnnnnnnnnnnnnnnnnnnnnnnnnnnnnnnnnnnnnnnnnnnnnnnnnnnnnnnnnnnnnnnnnnnnnnnnnnnnnnnnnnnnnnnnnnnnnnnnnnnnnnnnnnnnnnnnnnnnnnnnnnnnnnnnnnnnnnnnnnnnnnnnnnnnnnnnnnnnnnnnnnnnnnnnnnnnnnnnnnnnnnnnnnnnnnnnnnnnnnnnnnnnnnnnnnnnnnnnnnnnnnnnnnnnnnnnnnnnnnnnnnnnnnnnnnnnntttatttatttctgcgacatgctaatttcggtcgttattttagttgttatttcagtcgctaaatttttttgcgacaaaatattatggtcgaaaaaaaaaaaaatgaaacatagcttagaagtcataaatgtgattacgactttaaagtcgtacccactttcacgacttctgaatacaatttttttaaaaaaaattaaaaaaaagtcgtgccacctggtgtgatttacccctaaacggtaattttttaaaacctacccccacttggtaattaaaaataaaaaaggcccccacttggtgaaaaaaccatcacaagtgttagtttattaaagggcatgcagcagatacagaatttttatatgttgaatttctgcatatatattcgcatttataaacaccacctaactagaggtaagcatcaaagggttatataaagaaagttactgtaccagaaaaaaagttacacagtagattgaggtgcgacagtgaagcatgcaaacatatcatacatgaacctagcattgaaatggaaatttcaaagtaccatttaactatgggactgaagaatgataagtttattttatttgatgataaagaagcatgaatgcatgtatttttttccaggttctgaaactttctggggacaaaatattgtcatcacgtcttataattgatgccatgggaaacttctcccctgttgtaaaacaggtcaggaatatattttcattcattgttgtattcttacagatagttcatgattttcatcacgtgatcactaggatgttttctcctttcatcatgttatcacgttatacaggctctggctgtcatttatatgttctcctttgtttatctttgtaagggtgattgtcttcgagtgagacaacataaaggtcttctgttgtgtgttctatcctgcatatgtaggacacattgactaatatatgtacgtgcaacatcatttaatatgcatgcaaatgcaagtgatgcaatatctgttaaataagtaattagccaactaaattcctaaatgattatgagactgggaggataggaaaataatgatctctttcatccagtattattgattgaatcatcaccaaccagaatgagactgattactccattgagaatataaagaaagtttctattcattaaagttctacatatgctaacttgatttaatgaaagatagataagtacctactgaatataaaaattaaaaccttttcctgaagcttcttccaagtgtcatgttcaatgattttacagataagaggtgggaggaagcctgatggtgtttgccttgttgttggaacatgtgcacgtggctttgaaacaaactccagtagtgatgtcatattcagcagttcatcaataaagaaagttggagattcaaaagcacaattattttgggaggtaacttgtactatatcaatagaaacacagatccccatctctatttttaagaactttaactgaaatcttcacaggcatttccagcaggctcaggtcctttggaccgtactacttatgtgttcacttatgtggaacctcaacctggatccccaaaattggaagaattgttagaagcgtactgggatttgatgcctgaatatcaggctagttttcttttcttcattgtgttctctgatggctctatttcttttttttttttttnnnnnnnnnnnnnnnnnnnnnnnnnnnnnnnnnnnnnnnnnnnnnnnnnnnnnnnnnnnnnnnnnnnnnnnnnnnnnnnnnnnnnnnnnnnnnnnnnnnnnnnnnnnnnnnnnnnnnnnnnnnnnnnnnnnnnnnnnnnnnnnnnnnnnnnnnntcctccccttgtctgtgcttcctttcttttctctaataaaaattatttctctatgaaaaaactaagatttgaagtaaaaagatctttttattcaatttcctgttcttaacagccaaactagaagcttgaaaatggcagtctgtgtatgaattatcaagtcacaaaactgtttgtgattacattggtgttatgttactaatcaattccatttatgtacatcatattatccttgtcttttatctctgtttatttaaagagtgtctatgcaatcagttctgtaatgattatgctaactgataaagttttacactctttaaatattattttttgaagtcatataagtaaccaaaacatctatatttgacgtgatgcattcttctatactggtgttctactgctctcagcttgactgatgtcaatttgcaacttcgtttagggtgtttcacttgacaatttggagatactgagagttatttatggaatctttcccacatatcgtgagaggtattaatttggaatctctcccacaatttgttttctctggctgaaagttcttgcttcacttaagattgacacctgaaagcaatacagccagtcagccagtagtttgaccttgaagatttgaatactataagttaaaacacatcattcatttaattcctttgtcattcaaggttcctgtaagaatttgaaccatgtgttgtgcatggcaattcactgtggaagctactaaataagttgaacttccttatgcttgtttcataatgtctcaattcgaaattttcaaatgtttctttggctaacctgtcactgccagatggcactactccattaagtggaaataaatgaaccatccaacttttaattgcacatcagaaaattatctttcaacttgatgtgtcctctgtatctacctaacatctgctatttcccaagttcgttttaaatttatttcgtttcctcttacttatatctttacctatcgtttgtttaataactgtacaatgtttgatgaaatggagcacctagcagtccgctaccagctgcttttagtagagttttacaggtaaattacgttttacacttatcaagcctctataaaattaagccatctatgacctatcaactaatattgaagtaatgaagcttcattctctgtagtttggtgatgctagtggcatacaatcacctgtttcatttggtggatttggaagcttgaccaggcacctggggagactgtcagctggtaagcctttcggtgaaattcaaacttctaatgtatacttttgaactagttgaagcagatctattgcaatgttgtggaacaggaggttttttttttatttttagtttcatagttttatttatgttttatctgtgagacatgaaactatgaatctgttagtttttctgagtattgagtgaactccccacctccatttttctttaccttgccttctgttttcagctacattggaacaacctagttcagtaaaatataatgtggctgaaacagatttaggaagttgttcaaacaagtaacagctatcaacaaaaaataggcacattattgagataatctgattctttttttttccttcctttttttcactttattacaatgaaggaatacatgaagcaatcaatggtgattatcttgactcatacagcttgtcactgctgaatccttatatggtactttccaacttctctaaagactgtttcagcaactgtagatgaaactaaatacctggccaatattgtgtataatgcagcccaacttgagtgcttcatggttgttccaaagagcaatgtcagcaaagaaacagtccaatgttcccgcagattttattaatgaacttctttataccaattttagttgtatgcaggtagtttatttctctcatgactcattataattttattctttcttactgttgcttctattttatctatcacttctgcagaggcttggtgatccagtgctccgaccatttctacaggtggacttcttgtcccggtctgaaactctggatatgttttttgctttgtatttgtgagatgtgcttcccaaaatattcatttaattgagatgagaactaaaccaatatcaaatttcaaaccgggaacaatgactgtcctgagaaattatccattttttattgcaggatgttgtacagtttggtccactttccaagacattgggcctggttatcttaacaaatcctaaaatactcccatccatattcaaacaggtaattcatgagtttagctatcagtaacttcttatttccttttttcatttcaagactgcaaagatgaataaatacctaaaaactgaaaaaacatctcttcctacatgtttgtgctgctttgactgacatagctcataacataatttatatgttcatctcttagtttcttatgtcatttaattggacaaacaaacatctaacaactagttggaggtcaataaaaatatacggcataaataattagtgaagcaaccttttcaatataggggatttagcattttatctctttccaggttggtattcctgtacttcttgattggtccagacattttctggggcttggctactacacctttttatcgacctttgctgatcctattgtgaggtaaaagtctttacaaagtccttctaaaccacttattagcttctttacttattcaacaagcatatagatataggtccaactaacacacccttatattctatgcacatgttctatttgcaaggccatttttaaatacattaccatccaaggcgagtttccagtggaagcggcatctcgaggcttggaaatatggagctggtcttgattacaagttatagtaactacttttacatatgattcaaacaaacctacaaaatagagatgatgtggtggcataattggtttttccctcacatccaatttcttgtggttcttctcaagatttactcttcatctcattcgttcttgatcttcaatggaaacgggaagttttgattcatctttaccacttcaacatcaagtgaggtgacataaatgaaaagtagttttaagtccgagatatatcatctaaattgtccatagggtgttccataacgaagcatggaaagagagcaccaaatcaaatcaaatcactaatatattagccttgtaagaaacgtcatatctatactttctaacttatcatttgcaccaatgtgttttccgtccccaataaaatgagatgtttataatacgtttcatcaaaatccttagtgagcagtatgttaacaccatcaatttaataaataaacaggcatcagtctataaaaatttgagttttacaactttctatgaaaagtgattataaacaataactttatgtataaagaggtgatgtgtctacgtttttcctcgatgaacaacatcaatagcagcatacagcattccttacggcacttaaatggtggattataacgacaattacttaattatcattaatatatttagtgaattcaggactttctttgatatagggtccattttaaacttatttgttaaaataatgttttttaaataaaataagcatttttttagtttgtttaaattatttttacttaaaaaagtaatttttttttcaagaagtaaattctatctatttctaaaataacaatttctaaaaaagtattttgttcaaaattatttttttaaaatttaaacaaactaactcttagtcatctcatccttataacatcttcaagaagcaatgcttcctctgtttgttttatctaaatctattaatttatatcaaaattatttttagcttcctaaattaatcttaactatgctttcatttatacgtagtgtataaatatttaaataaaagtaagaatataattaaaagaacaatagtaattgatattgtcttaagcgagttatttccatcatgtggccaaagtcataattttgaatgcaaaattgattctattaaattttactaccaaacatgttagatattgatctcacgttgccaaaagtcatcttgttacaacagatcatggttttcagaaccttaacaatatgtctagtctgcttgaagaaacaaaaaaagaattgttgaattaaccaaaacaaccatattccgcaaattattactatctgaattattgacatacacactattttgcattatttttactctcctgcatgcttcaacatatacggccataagaatcgccagagacatactccatccaaattatctatgtttggatgtccatgccactatttccaaagcaactaaagtaaaaggaaaacaaataaaattgtagatctcaatctgttctttttgcaccccaaatttttgacagctcctttatgatagtcttctgcttaacatcgtccctttccatatgccactttcttgacatattctcagcctgcaaatccaagttttgagttaggcttatgaattgaaatattcagaagattaaagaaatacagtttaaaacttgcccatatctttaagggaacaaattgctctttgatattctcaagttgtggctcaacatagtcttttcccttagttttgatgtcactcatctgttacaaacaacaaaaatttccgataaagaagttaaaaaactaaaatggacaatttatttggcaatatagagatctattaataaaactgaaaaaccatagaagaaaaaacagtatcaatatacaataccaaaggcttatacgaggaagttttacggttctaaatatgtcattcaacatgatgaataatttatgaagaatggtgaataaaaatgcagcaagttaggcattcaagtgggttacttgactaattttaaagcatacacatgtattaagaaagggagagaaaaattgcatataattgaaatcacttacattctgcagctctaacttggaggccaccacaccaaataccaatgcaacaccaccaaatacaaatgcagtggcaacagcaaacgcctttccaactataaaattggaaattaaaagttgcattagcaaacataagcatcataagcaaagaatttgccaaaaacctattttttttttttttcttaacttcattattggtataatgagcataaaaaaataaaataaagtcatatctaatgaactaaacaaccaactgaactttatgtacaagcaaatcaagtataaaaaagtgaggttattcccgggcttcactatcccaaaatggtaggacattaatgcattgtcttcatagacatggtatttacaaactaaagcacaaaaccttacatgtatcaacagtgcaacttctggtgatagcaacaggactatagcaagtgatattgtgtgctataaataactatgacccccatatgtttctccttgagttcataatccaaagcaggtttctcagggtgctgattataactgctaatgccccactttagtttttcatattctaaatcatacttagtccaataacagagaaaatgatgcctattttggttttatttattaaccctattaccacacactcaaccctaaacctttttacaccagaaaagtaacttctgcccaaatagtatcccattacttcattccccataaaagcaacatatattgtatgacttaactccctctccctcctcctcaatttctatattcaaaatataaaacattctaacctcaatctcaaactaaaaggtctgtcttattgtaacactcccaacaaataacaaaacattgcttaaacagcttaaagctctatacttgaggattgctcacttaaacttaccaatattgctaatttaatatcacacacaactacaagttttctactgttacagggaccctatgaaggtttaactctagctcgtttagttgatgagaaacttgaaagtatcacaagttcccgccctcaaattaattaatccacactctacacccaataaaataagattacctaatctcccccaaaacctttcccctttatactaccgcatcaactcaaactggttggaccaagtttcttagtagccacacctgatgctgaatatattggtatttcaactttgacatatttggtcaaagttgaacagagtatcacattctatagagggatcacaggatgaccataaattatggtgggccttgtctacaccccagttttccttaaaccattatctgcaacagattccactataaagtccacagagacaggatgaggttatgtgaaagatgaagtaccaaacctaatatatgtaagtttgtcaagtatatagagtcaacaatgtacatattcatcagtgagaatttgcattagagataccatccatcttagaggaagttaatgagatgaaaatgtaccatatgcaagcccttcacctgcagctttcaacttctcggggttaacatgggtgctatatctgtcttgacgcgattcattagctgttgaggctgaaaccgtgtttgctgcttcaggcagttgccacctgtgtaaccaaaccattgtgcataaacaattgaacaaacaaaaccacccattataaacattagaaaagaagatgaatcacaatcagcttcattgccctattaaatctcaaattataaaatttaacagagtaaatagcatacactaacagtgtaaaggatttttacaatatcatccaatgacaggccaccttatttgataagttcgttaatttttaccataattataatcttaaaagtcacgcccaacgatgatttctgattaattgagagtatactaataacacacaaaaattaaactcaatttaaaaacaaaaagttgaaattcaaatgggaaaacattatgcaaatgaaatttgattcataaagtgaaaagaactggggaattgaaattgaagagtgatgaaggaaccttttggggccaaaggagacttggggcagggaaaggtaagcacgcagaggattgagagcatcaggggatacggaagattgggttttggggtcggaatgaaggacccatttggaggcagagaaggaaaaagaggtggcttcatcatttctgaacactttggaaggaagagagtgcctcagaacctcgggaagtacatccgcatgatcatatccttcgtgaatgttaaggttgttgttggtcttaggaagagggtttttttgggctaattttcccacggcttgtttggattcctggaaaaagtacgcagcttctttcccagctaaccttcccgcgagaaaactcatcttccagattactctgttacttttgtactttgtactttcttcccaccgtttcattacgtatttatatggctcccaagctatctactttattgaatttagttgaaaactgtcattaattacaagagtagttatattttcccaataagaaatttcaaacattcaatcaataattttcttttatttttatctttcttttttctatcacattacatcaattaaatatatcacttatttatgatcttttctttctctttcaagttataacaacaaatatttttctaattaaattttttcatatatttgttttatccataataatcaaaaatacattagtcaaacaattaagttaaagatatattattgtttaattataaacaatgattgacacaaatgattaaagatttgaaatgtttcattttttatggatgagttagaatctcctaatttgtgatttaggtctgtgcaataatcttttaggtgtatctttgttgatagtttcaacatgtcattagtgtcctcctccatggaagtgtatttttattttatcattttatttaactaaaaacaaatctgcttcaatttaaaattattaactttttaataattattttaaattttatagtaaggnnnnnnnnnnnnnnnnnnnnnnnnnnnnnnnnnnnnnnnnnnnnnnnnnnnnnnnnnnnnnnnnnnnnnnnnnnnnnnnnnnnnnnnnnnnnnnnnnnnnnnnnnnnnnnnnnnnnnnnnnnnnnnnnnnnnnnnnnnnnnnnnnnnnnnnnnnnnnnnnnnnnnnnnnnnnnnnnnnnnnnnnnnnnnnnnnnnnnnnnnnnnnnnnnnnnnnnnnnnnnnnnnnnnnnnnnnnnnnnnnnnnnnnnnnnnnnnnnnnnnnnnnnnnnnnnnnnnnnnnnnnnnnnnnnnnnnnnnnnnnnnnnnnnnnnnnnnnnnnnnnnnnnnnnnnnnnnnnnnnnnnnnnnnnnnnnnnnnnnnnnnnnnnnnnnnnnnnnnnnnnnnnnnnnnnnnnnnnnnnnnnnnnnnnnnnnnnnnnnnnnnnnnnnnnnnnnnnnnnnnnnnnnnnnnnnnnnnnnnnnnnnnnnnnnnnnnnnnnnnnnnnnnnnnnnnnnnnnnnnnnnnnnnnnnnnnnnnnnnnnnnnnnnnnnnnnnnnnnnnnnnnnnnnnnnnnnnnnnnnnnnnnnnnnnnnnnnnnnnnnnnnnnnnnnnnnnnnnnnnnnnnnnnnnnnnnnnnnnnnnnnnnnnnnnnnnnnnnnnnnnnnnnnnnnnnnnnnnnnnnnnnnnnnnnnnnnnnnnnnnnnnnnnnnnnnnnnnnnnnnnnnnnnnnnnnnnnnnnnnnnnnnnnnnnnnnnnnnnnnnnnnnnnnnnnnnnnnnnnnnnnnnnnnnnnnnnnnnnnnnnnnnnnnnnnnnnntgctttctaacacatgttacttttttaatgtctaaatacatattacttaaaattattaaaaattacaaaattaggaataagagtttaaaaagcaaataagatttacttcctaatttttttataaaataaacttattttaaataaaataatttagacatacatgcattagaaatgttataagatttttaagaagaaaaaaaaacttaaacaaaacctagaaatttttgcaattttccatgaattttaacctataatgtgttactagcataacctttctctaaaatatatcttaacacgtatcaaaacaataaccttgattgttatatatgttgtaattcaggaagatcatctgcaaaagtgataccgtgtaaattgctttgtataataaaatgttcttattttattgtatagtattattgctctactttcaaacagaaatgttgactataactctataagcagacccgagagcactaaaaaagattatctaattacttgggaagcaagaattgtgcacatccctattgcagtattgcttggagataagatcagtatgcttggagaaaaagtttcagtttgacatgctgtataacaaatgaaatattttttatttttttccatctatataagaattaaagacacgtattaatttttttttataacagtttattcttttctaccaatcgaataagatccctttgataaatgagatggtcttgatagattttggacaatcaccacatccctattacttcttcatattttgcagaacgaaaataattctaatgttattattctatttgatttttttcttttgtctttaataggtatttccatagatttataatatattcgtaaatgattgaatcttagaaaataattatacttgtttttcttcaaaatatgaagaagtaaatatgcttttagttatgagattaattttttagatggaaggtaacgattaagtttatctaaattcaaactcctactgttataagtaaaacttatatccattgcagtttttgacactctgtaccctacaacaacaacaacaacaacaaaatggctattgagtaacgttgatgatagagagagaagttgtaaagttgatagtacgtgccagtaatgcgcaacttaattctattgcagtctgtgtgcacgtgtttgtgtgcgtggagattgtagacataaaattatggaatgaataattaccaaaaataaaatttatactacaatgaatatgtgtcggtggtacccaacttagttttatagcccatttattttgtgacaatttcaaattttatcgtagggtgtgtttttttaatagtaaattatacttgtattttatgtgtttttttttcaaattacatttgatatattttttttatacattacttttacatcattctattaacatcattagctaatgtcaattgaaatatttgaatagacgaaattaaagaaaattatattaacatctcctgtgtttttttttttttttcaaattgtacccaatatctttccattgaatctaattctgacgaacatgtcaagattattgatgtcaccgactccaatggtgtcaatgtccagggaaccagaaccagacgcaccggtgatggtgcatggctgaagttacgatagtggatgaggaggtggtaaaagtggatatggcagtggtgacgactgctacaaaggtggcggtggctacagtggaggtagtggttgttccagggagagtggatgcacccgaagagaggttgctgctgtgggagagaaaggaggaggagaaagaggggggtggtaagtgaaaaggagttgttgaagaagagaagagtttatgaaatccaagatatgattttgaagatgaagatgagagtattttagacataaattttcattaaaagttgtttattttctgttaagttattaaacggtatttaagatgaaagagatctgactgtaatatgagttaaacaattaagagatttttttttaggatgaaaaaaagaaaagtatcaaatataatttaaaaaaaatgtagaaggtgcaaatataatttacacttttttttcattccgaaactctataggcactagtatgtgactctctttggataatgaatgactaacaaaagagactaactttactgatataattcaatttcagatatctactgtttcttttataaaaaaaaaatcaagaattactatcacaacatcccacaatttcaatgaccgaattccctcttaatttatacagataatagatgtggtttgtttatctaatctaataagagtttgtctagttgactcaaaataaaaatgagattaaaattttttatctttaagatatttgtcttattattaattttattattaatgtgattattactatatttaatgtagcatcctttctctctcatgttattaatgtgattgaaatataacaaaagcagtttttcaataacaatttacttttatattagttaattacttaacgtctgataattttagttaaaattttgaacttagctcctaactttttaaccactaagaaattggtttctatatatatatatatatatttcaatcactaagttataaatattaataattacgttaatgatagaatttaaaaaagacaaatatctaagttcaattagcttcttcattccgcctctcattgtgaaacacaaccttatttctctgttcccaaaccacccccaacttctccaaaaatcctctcctatttagaagtctcctccattcacattactgtttttttcaatttgggagtggtgacaattgtcttcaaaataatctcttttatagtttcaagctctaattattgtctcaaattttcaacacctttgaaaatcgcatcctcgttctttcaaagataaaatgttgactttccaaaagtcaaaaaagatattccatcaacttccaattcgttagaaatttaaattgatttttccaaaaatctgttactcaattaaatttccaaatctcatcactagctctcatgtcctgcgcatcgtgcttcaactgcaaaaaatcttattatactccctgccatagttttgattttattattcatttatgagtattaacactatttgtacttgttgtaaccattgttagttaccactaacagaaaacatcactaacagaaaactgcacaaattatcgtctctcacaaatctaaaacctttaaaaacctcaatccctttcattcaaagataaatatagatttaatttcttcggatcaacaaattccatcaatttacgatacattgaaaattaaattgcttttctggcattttatccacacggtgcaattggcacatgcatgctggttgtttgccatgggctttaccactctcgtgaaccttaggatcgatggcacagggagcccctcattagcactgtacccacctatgagtaataataagagtctgccactagccatgtgcatttctataacaatcaaatctgctgttgacacaaaataattactattttctagctatgaataattaactctagcagggattcaagcttctattttagccctgttcagataaaatatataattggggtttgataaaacttgacttattgccaagttatctagctaaacttaattgtcaaatcattcttttaatttcctaattgcacatttgttgaataaaatcagtaaagaggacaggatatatagcgatcaatgatggtaaagaaaataatggtgatgataatgataatgatagttatactgttaataattatatgaaagaaatgtggcatagtaacaattatattgggtcttttgaaagaaattagaacagttccacatgtaaatcatgcttgataaaccatgcaaacttgagataaaataaaggaaagagggtgaagtgaaaaaaaagtgagttcacatttcactgtgttgagacatgatgagggccggataggttttatattactatttataagacaaaatgatttatttttacaattgacaacaaaaagttaaagtatatttttagaaaaaattgagttaaaaacactttaaaaaattaaattaaaaatgaattttagagctccaacaaaaatccagtgcgaaacttaagatttaacgtttggcagccacttatatcagcattgctaaatagttggcaaaatatgtctagaagttaatagcatcaagtttcctaatatcaactaacaaaagatcaaagctatatctgtctatatcatatgtaatattaaggttttttttttcaccaaattatgtgacatttttatttttatttttaaattgtttaaaataattttaannnnnnnnnnnnnnnnnnnnnnnnnnnnnnnnnnnnnnnnnnnnnnnnnnnnnnnnnnnnnnnnnnnnnnnnnnnnnnnnnnnnnnnnnnnnnnnnnnnnnnnnnnnnnnnnnnnnnnnnnnnnnnnnnnnnnnnnnnnnnnnnnnnnnnnnnnnnnnnnnnnnnnnnnnnnnnnnnnnnnnnnnnnnnnnnnnnnnnnnnnnnnnnnnnnnnnnnnnnnnnnnnnnnnnnnnnnnnnnnnnnnnnnnnnnnnnnnnnnnnnnnnnnnnnnnnnnnnnnnnnnnnnnnnnnnnnnnnnnnnnnnnnnnnnnnnnnnnnnnnnnnnnnnnnnnnnnnnnnnnnnnnnnnnnnnnnnnnnnnnnnnnnnnnnnnnnnnnnnnnnnnnnnnnnnnnnnnnnnnnnnnnnnnnnnnnnnnnnnnnnnnnnnnnnnnnnnnnnnnnnnnnnnnnnnnnnnnnnnnnnnnnnnnnnnnnnnnnnnnnnnnnnnnnnnnnnnnnnnnnnnnnnnnnnnnnnnnnnnnnnnnnnnnnnnnnnnnnnnnnnnnnnnnnnnnnnnnnnnnnnnnnnnnnnnnnnnnnnnnnnnnnnnnnnnnnnnnnnnnnnnnnnnnnnnnnnnnnnnnnnnnnnnnnnnnnnnnnnnnnnnnnnnnnnnnnnnnnnnnnnnnnnnnnnnnnnnnnnnnnnnnnnnnnnnnnnnnnnnnnnnnnnnnnnnnnnnnnnnnnnnnnnnnnnnnnnnnnnnnnnnnnnnnnnnnnnnnnnnnnnnnnnnnnnnnnnnnnnnnnnnnnnnnnnnnnnnnnnnnnnnnnnnnnnnnnnnnnnnnnnnnnnnnnnnnnnnnnnnnnnnnnnnnnnnnnnnnnnnnnnnnnnnnnnnnnnnnnnnnnnnnnnnnnnnnnnnnnnnnnnnnnnnnnnnnnnnnnnnnnnnnnnnnnnnnnnnnnnnnnnnnnnnnnnnnnnnnnnnnnnnnnnnnnnnnnnnnnnnnnnnnnnnnnnnnnnnnnnnnnnnnnnnnnnnnnnnnnnnnnnnnnnnnnnnnnnnnnnnnnnnnnnnnnnnnnnnnnnnnnnnnnnnnnnnnnnnnnnnnnnnnnnnnnnnnnnnnnnnnnnnnnnnnnnnnnnnnnnnnnnnnnnnnnnnnnnnnnnnnnnnnnnnnnnnnnnnnnnnnnnnnnnnnnnnnnnnnnnnnnnnnnnnnnnnnnnnnacatcaaataaacctatgataaaatctatttaccattaaaaggttgatcaaatcttaaaatatttttcattttatatttttaatataaaaaattcaaaagtgatgactattcaagattccgtactcagcatgtgctcttaatgatcacatttacaaatcatttaacaaaaagtctattaattatcacaagactgttgaatgatttgcgtgacaaattaaaaaattatgatggtttcttacacattcatccttagtttaagaagcatgtctgcaattttttttttttaaaatactttcgaacattcatacaaatatttctaatgtaaatctcataaagattgccattttttaaataaaccaataattaaaaaaaatatttctaaaaaggttaagaaattaaaaaataaacactaaaaatattatatatttttaaattacttgaaccaggttctttaacaccgattttcacgtaatattgattaattttaactaatttttaatttaactagtttgactatttttttgctctactgtttttttaattaaattatgtagccagcacgcagtctaacctatgttattaaaaattatgaaaaatgtaataatagactagcagggaagctcaaataaggaatctattactattaccgtagctagcgcgtggatgggtcgccaaagcaatcatcaatattattttatgtgtttaacaagaaattattaggtgatttgaaattattataactcaattaatcagtgtataacttgtaatgaaatttattaattctttcttatagtacaatgaaacacctaaatagatgttacaaaagagattaattaggacaataaatatgtgatgatgtgatactatttatttctttcatcttataataattgttgtgaaaaagttattttaaaataattttaattttaattttttaatgtaacatcaattatactttatgaattatatctcttataatattaataaacaaaaattaaatgaattaatagtgataagtttatttttgtaattctcttctatctatttattagattttattggtctttgtgaacgaatttaggagacaattataatattatgaagaaaataataatttttttattaacatgtatttattatttagaagtctagcttaattaattaagtaaaatatggatgatagaaaagtgacggtggcatggccaatgttaattggcaattgacactacctctcattgagtatatccaacaccaacatattatgttactactttttattttattttccaactacacaattatttcacacaaccatggtgttcaaaaatcaacacgcgcacaccaaaaaggctatagctggagctggtggtgcccttggtgggcgtcctgtaaccagaattggtatatatgtgcacttattccacccctgtgtggaccacaaaccccaccttaatttcacaccaaaaccaaatagcttcccatatggattttgtgtgcatgcaactatggaagtgagatatattattatacactcactgtacaccatatatacttgtactctttttttttttttttatcctaactaccctaccattttggagaaacaaattagaagtgaaaatataaaaaataaatgtacaagaggttctgggaccaaaatattatgtaggtagggtgagactaagaacatgtggagtctatcatcttctggcaacaaatattcttgtgtgtgcacaatatggtggagttttattaattatttgcatggttgttgagtgaagtaatgggtatttaacacagtgcattcaaggtttggggcctatgacatcagaggaggtataatgacttaactgtttgatctttgatgactgccatttcattttcatatattaattttgaactcaaaaactcaaaagcaacaccacnnnnnnnnnnnnnnnnnnnnnnnnnnnnnnnnnnnnnnnnnnnnnnnnnnnnnnnnnnnnnnnnnnnnnnnnnnnnnnnnnnnnnnnnnnnnnnnnnnnnnnnnnnnnnnnnnnnnnnacacacacacaattgaattgatgcgaaacccaaaaaatctgtgaaaacctgttagtcaactatatgttctatattcttcttctcaacagttgttttcaagacataggcagaggaggaccaagaaaattgaaaaatgtttgctaatgtctgatggtggatcccaaagtttgaccaacaaaacctcaaatcttagcagtggttgcccaagaaattgtaactcatttgacatgcaaccagttgtgaattatggagacccttgtttgattttgagccatggaagaagcaaaactatgattgtataatgaataaagcatacaattgcgatcttaaaaaaatttggcttcttcaattgcaataaaacaggaaagtttggttaaggcaaagaaaatgtataaaactgtatacacaaactacaatttataatttattgtttcatacttcctaaaaactcaaaatgctctctttaccttctgtacaaggactctccactaatctagctaattaattaacaatcatatttctaacatgacttaaaaaatgcaacttgaattctgctagcatataatataacatatatattatatttgtatttccctgtatataacaaagaaggtagtgaataagaaagaaaccatatctgattacactatatatgttgctgttgccaccaaaatctgagagagatcaagctatctatctcttgttgtgtaaagggttggatcctgttggcactctgcgtttgtcagacataaactctctttctctgctgcttcggattggagaatttgcccacggatgaaaatcttgatggcttgaagttgaagggcctgagaatttgatcctaatggcatgaatttttggtgtaaggaagagaagagcgaggaagaggaacaagtggaagtgtttcatgttcgtagtttttttttttagtaaggcctcggagaaacaaaacacgaagtgatggaaatgcaaaagtttggtgtaggctaggcttgtttatgttgtgtatatatttatatggacaaggttaggtccaacatgtgcatactaaatctggtgatatttatgaaaacacttgtggtgtttccgtgtgagtttgggtggtggggcatggcctaattgccgtgtgattgtgatcaaatggtcaatgatagatatggggatcagggggcctagaatgccggttgtggggggggtggtgtggtggcaatattcaatgagatagtgacagagaaaaatgaacacgaactcataggaggtgcatatatgatgtgaaagcttgaaggcaagaagggtctttgattttgtattgtgaatgaccaaaatgtccctgtttttggtttctgaaagaatgaaagcacgcgaagtatgataggggcgttttcgtcatgaaaagtcaaacctcgccgacgcactcaattggccttgttggaacagcaagcagcgagaggcatgtggcattgaaatagtgctgctatctaattaatcaaatagaattaaaataataaacatgttgaaagggaactatactagattactagttattaagcttatacacatacacacctccataaggtaggttaagtagatccgtatttgctgggtctaagtcaaaatgtagattttgaggactggtcgattttgagggactatatattgttcttaattcctacccaccatgcaaacttatgtaagaattatagtttttttttttttgttttaaattggtttttttaaatattagtaattgtaataatattttaataattttttatcaagatattgatacgaagtaattatgtcaaaagtaaagactaatatttattaagaatatcatgaacacacaaattgagttttcaacacgatttattttatatctaaggattagtcaagatttgaagcttggattacttgtttaaagaatataaacttatgttaatttgttgataatactttgatgatatttattattaatttaataattcaaataaatgaaataattattgtatttatcatttttttggtactaaaaagtacccaaaaaaacatgataactactttagtctttttctttagaaaaaaaaatactactttagtctgtcataaaaataaatgggagacgttttaatttttttgactaatttaaaagtaaaaagatatttgtaatgataccgtaatctctttatgtatagtttaaaaaatatttgacttattccgctaacagaccaatcaaaacctctcccttcttctattattcaagatacaatagattatgggtctcgtaatgctaatagtcttgtattgaatcattgagccatgtataacgcatgtaattatagtatcatatatttaaactgtaccaaaaaaagtatcatttagaaaaaatacatgtcaataaagaggagcacgaattgtcaatgttaaatctagtggatattgatgtatcttcttgcacgggtgagaatagggaaaggccaaaaaaggcttcatcctgaagcgtctcggtgaaaactcgtttttatgtggctttttagcttttggtatggcaaaagatgaaaccataaataatgagaagaagtactactttcatgttttgtgttgtgacttagctgttttacactcaaagctgtaagcattcctcaaaagggtatgtatatgccttatagttaagggggttaggttgggcgttaattcaagtttaaatgttggagacaattcaatagtcaagaattccaaaagggaaaataaagtgatagacaattagtagtttagagaaagggttattgatttgaagaagaaatgcaagttccttggcggaaagttatttgcattatcttactaacaaacaaaatggtgatccttctttattattacgtttagtggtttatcataattcatatatagcatctccaatatgaagtgcgagaaaaccacaagtcatgtattatattattcataaagttcaaagagaaaaaaataatataagaggtcaatagatgcactttttaagcttgtacggttcaaagctattgttttctcatccatacaaagtaagaaattaaaaatgtgatggcactgaaattctgtggtccgcccacaaacgcagataaactttcaaatatgtgttcatgggagcatatgcatttttttttcacccacttttgaaggggcatgacaaattgcattatattatcaattttactattctataatgtaataagagtaattaaatctaattatgtaagattaattttagcggtcattgtttaacgaattacttatttttaaatattgttgtttatttttttatcattaaaaatggtttacgtattatattagattatttaaaattaagttctgattacttataaataaaacattttttttgccgtttgaaaatcattaaaaagaattaataatttaagaattatttaaaattatatcattaaagtaaaatatataagttgtttaattataatgtaacattttaaagaataattaatataagataaaaaaattaaaataaattatttaaatttcatcacccattaatacaacactaatattttttaatttcaaattcaaaacaatgcttatcgtatcctcttcaaattcaagaaaaataaatgagctgatattccaactggaatgaccccacacaaggagttaatccataccatattatgcttttctttccaaatttcaagttcatcgacatgttttattcataatgtatataactactattcttatgtaagggacatttatgagtattattagaaactaatgagtggtttcatggtgattcaaagtattattttcatagctttcacatacagaagaattaaatctnnnnnnnnnnnnnnnnnnnnnnnnnnnnnnnnnnnnnnnnnnnnnnnnnnnnnnnnnnnnnnnnnnnnnnnnnnnnnnnnnnnnnnnnnnnnnnnnnnnnnnnnnnnnnnnnnnnnnnnnnnnnnnnnnnnnnnnnnnnnnnnnnnnnnnnnnnnnnnnnnnnnnnnnnnnnnnnnnnnnnnnnnnnnnnnnnnnnnnnnnnnnnnnnnnnnnnnnnnnnnnnnnnnnnnnnnnnnnnnnnnnnnnnnnnnnnnnnnnnnnnnnnnnnnnnnnnnnnnnnnnnnnnnnnnnnnnnnnnnnnnnnnnnnnnnnnnnnnnnnnnnnnnnnnnnnnnnnnnnnnnnnnnnnnnnnnnnnnnnnnnnnnnnnnnnnnnnnnnnnnnnnnnnnnnnnnnnnnnnnnnnnnnnnnnnnnnnnnnnnnnnnnnnnnnnnnnnnnnnnnnnnnnnnnnnnnnnnnnnnnnnnnnnnnnnnnnnnnnnnnnnnnnnnnnnnnnnnnnnnnnnnnnnnnnnnnnnnnnnnnnnnnnnnnnnnnnnnnnnnnnnnnnnnnnnnnnnnnnnnnnnnnnnnnnnnnnnnnnnnnnnnnnnnnnnnnnnnnnnnnnnnnnnnnnnnnnnnnnnnnnnnnnnnnnnnnnnnnnnnnnnnnnnnnnnnnnnnnnnnnnnnnnnnnnnnnnnnnnnnnnnnnnnnnnnnnnnnnnnnnnnnnnnnnnnnnnnnnnnnnnnnnnnnnnnnnnnnnnnnnnnnnnnnnnnnnnnnnnnnnnnnnnnnnnnnnnnnnnnnnnnnnnnnnnnnnnnnnnnnnnnnnnnnnnnnnnnnnnnnnnnnnnnnnnnnnnnnnnnnnnnnnnnnnnnnnnnnnnnnnnnnnnnnnnnnnnnnnnnnnnnnnnaaattaataacaattgaattctatactaagttaacatgtgatttagcttatgtaaaacttaatatcaactcttacaactagacaaattaaacaatttttaaatatcttggttcatttcaatttatttattttcttaatggtgtgtttaaaattatgtttcacttggtgcgtgtattaatgaataatgagacannnnnnnnnnnnnnnnnnnnnnnnnnnnnnnnnnnnnnnnnnnnnnnnnnnnnnnnnnnnnnnnnnnnnnnnnnnnnnnnnnnnnnnnnnnnnnnnnnnnnnnnnnnnnnnnnnnnnnnnnnnnnnnnnnnnnnnnnnnnnattgcttgataaatctaatggttttaataagtcattaatcttattgatgagattataaaaaataaatgatgaagatgaggaatatctctaaattaaagaattacttttttgaagtaactgaatatatatatatatagttggattatgctagaaagattttaaattttaggttattcttgtaaatatttttttaatgtaaataccaaaatatttactataataaacttgcattacatagttgaaagaaatcatatttaaaactgttgaaaaatcaaggagtaaatatcaaaaatatttatatcaatgagtcatgatcaaattaaatttgacatcattttttaatacaaaatcttaaaatttaagtttatagatcttctcttcgatgctcaatttttttatttttatccattataaaatttcatcttgcttcaacaaaaattaataaattaaaataatatatttcaacatactttttaatcatcactaaattaaatatttcacttatatatttatccacacatcacatcacgtaattcatatatatatatatggttatatttataaagaaaaatctaattatctaaaagaataaagaaaaacctaacgttaattacttagaaaagaagaccatatactacatcaataatttaccagtaccgtaccagactatatttgattgatatatagttgtatggaaagtcttatatatgataagataggttgtacattattcatctctctagctagcctgaaagaaattgctttccaattattatcgattacaaattaatacaacccggagcatatatagttcatgtcctttgcaattgtacaaacacatgcatggccaaattgaggtacgttgcctcaacacttaagagttggaaattaaaccatatactttttcaattagcccttgcatgagtggattacttgcaactgcaagctgaccccgatatatatctgcaacaacgtaaaacggtccctactgtttgggttcacatgcacttacctctatttaggaggaacaaaccaaactgtgtttcgaggtaactcgatttaacatcaatgttgtattatactaatatctgctgctgaataacctttcgaacaatgcttgcgcaagctagtcatcaatatccacaatatttggactaattaaagagaaagaaaactaattaaaatataaattagtgaaattcagaaaatatgatcaactctagctcatatgtgtaagcaagtaacgtttcatgaatttgaaagatcatcacatggttatatatatatatataaacataagtattttgctggttgaaaaatgtgtatatattgttggagtagtagcaacgttgggtgtggcatcaagtccactagacctgcaaggcatcgtttactttgtgcggttgtttgtgactgtgatcagaagtcactcgagtggtttgttgaacaaagtttacttgtctttaatctttatgattccaaattacagataagtcaacccactcggattgaagtgctatatatatatatatatatatatatatatatatatatatatatatatattaagttgttggttagactataagttaaggaggaattttcatgagtctaggcctaatgaactttcacctaagcaccccatttcgtgtccccgatcttcactattttaacctaaatggtagccatttacacgaccaaaaagactacaaagaagattacaaacaatagttcttgtgtggttaggtaaggtttatcatattgaattagtatattaaatttggtaatctaaaaaaaaacaattaaatgaattcatattagtttgattacatggttgattttatttctcttgtaatacaaattaaatcaattatttttggcttgattcgtatatttaactatttaaatttaaattaactcaccacctaaataattatttagttttaaactttcaaatttatgtatttattatctaattttacaagtatcttaagttatgcttactatttaattttttttataacgtatgttttaagtagaaggattaatgagatatataaagtcatagatgtgaaaaagttatatattaattaaaaaatatcaatacttggaattgatttaattattttctggagatactaagaataaaaaatatttaatttagtgatataaaacttaaaattctatataagaaaaaaaagatgtacaaaaacttaaaataatatatataaatttacttttttgtttaatttggtatccaaaccaaactaatacaattaaatatcacacgtatcattattagcttttttattttgtgattactctacttaagttaattttgaagtatttatataattttcattttcatttttaattaaaatgttaataaaagaaattacatattttctaattaaataataatatcaaattatggtgatacaaatcgaaggaaatataaggtttgcttaatgataaaagaagaagaaaggcatagagaagttgtggacttgatgattttgaatttttcactaatagaaaattaacacctaataactaacattgacacggataaaaaagaatggtgattcaaaataaaggacatagacttaagctttaatttgggatttcaagtttggaccacatatagcccaacaaaaaggaggcacccaatagaaaaaggggcaacagtgatgggtacgtaaaaaggtgcaacttgactgcagctgtataaaacagctatgtaatgcttcagagcaactttccttaatatgagataataataattaccggctttctttttttggacagaattatcggctttcttaatacatcattacgaacaagtattctcctgacaattgttttcaaggatgatggattgcatcaatctattgatctgtaaccaactctctaatggtaactaatgaatcaacaattcctttaatgtgaagaatatatttagagataggccaagaatgtttatatatatatatatatatatatatatatatattttagctatgaatgaagttgacacatttttgctccaagttgggagtagtaatactacttatatatataatcatgtttaattttgttcaaaagaagattctattgcggtgcagcaccttctgtgcgccatcctccaaaactgaaaagaagattttaatttgacaataacatcttggcgccacattttatttttgcttttcacatgcttggattactataacattcagaatgattaacctagctagtatgccatgattcaaagagagacacgtaatatgaatacagtaatatatggaagaaacaaagtgggtggtccaaatcaatgaggagctcaatagtgatggtcctgcagcacctgagaagcaatgggagacgcattctatttacaaaattccctcacatgtcactgagctgaacaaaaaggcctacaaaagataaattaggaacaatggaaaatgtagaaacttaccattttcattttcctaagttctttcctacccatgtgccccctccatcggcattgtgtgacaattgaatctttcttgagcttcttataatatgaagcagctttgtggcaccgccaccgagcctgcaatttttcgagaattaaaatattgaatactgatgacccttatcaatgctcctaatcatatgttagccaactgtaacctgaataatgatggaagctttagtctgtttcctaaatctgaactctttgaaggaagcaattgcccttaaagctgtttgcaaagtaagtactgatgcttggagtttaatataggtattcctagcttcatatctgcgcatgttcttttgaattttcacagcagctgcctccgttctcttgatggtggaacatgatgtggataagaggtctattttcaaatcctattgttgaactacaatatagaaatgctaggtagactagatgggaaatattcttagtaaagaaagattcgttatgccatttttttattaagcagtttgttttcatttgtaaactgtgtaggacataccagaatacccttgagatcaatatagagggaggtccttgttcctatcatggatgagttcagccagctcaggtacatactttcctgaaaataaatagttgtattatttactattaatttaattagaataaatgatgacaaaaaataacttatgcaaaataataggtatttcaaatttcaattaattcaatacctgcatagctctccccagctatgtaaaatgtcctacttctatatgacgtcaaggccggcaacattctactcgacaccttcgccgctgtcaagctctccgacttcggtgtcgccacttgcttgtacgttgtgttgaaaaagcacaccgaaagcagaggcgaaattttcaaagtgcacagtaactttttactgtgcacatgcgttttcagcttctatataaagaagcgaattcattcggtttcagtaggtgcagcagcagcagctgcatcccacacttgagttcttctcttctctttgataatattatttgttataatattatttttgagtgtaattttgtgaggagtattccctagttcaagagagagataaaattgttctctccttgtgataaaagggaggttgtagtgttggagttcccatagtgaaattttttctactcttgtcagtgggtttttacctcagagttttcccacgtaaaatatttgtgtctatttattgctttcaatttcctttatctgttgttattgttctgtccgatggaatccggtttattaacagtggtatcagagccaaggttctttcttagtatgctctgtggctgcagcttagactgatctgtcacaccagaaaagaattatccttgggagttgctggattgacatcagtattaatttatactgaggtgctgcaggtgttatacagagactattgctgtatacagttactgttcgcaatcggagcattcctctggagaggtattttggatgataaagtgtgtgtggaaagttttgtcacaaagacgaaacagtctaaggagattgggtattaagtgggaccactagtgacccctccaatctttcctggaaactttcctggtgcactttccagaatactggttgaaggagaccgaagtgaagcagtgggagttactttgcagcaaaagcatttcgtgatagaaccatgacaacaaaggtagatattggcaaatttgacgggacaaagttctcgttgtggaaattgaagataagggcaattctgaggaaggataactgcttagctgcaattgaagacagatccgcaggggtgacggatgacaagcagttcaagaggacagacaatggaggagaatatgtagatggcaactttctggtgaccggctcgacttggtgaccggctcggacaagtaagaagacagttgtggatccatggacatgagatccattgtatcgaaagtcttcctggcaggtgagtccatgcatggaggccaggcagcgagtcccgcaagtgttgcggcggtacaacgtactaagagcataagctctaagagccactacttgtgaattgaaaaatgtcttccgcttgagggagagatgtggaaaggaaagccagttgattattcttctctacatgtgtttcggatgtcccgcatatgtaatgtacaactcccaagaaagaaccaagctggatccgaaatccaggaaatgtatattcttgggatatgctgacggagttaaggggtatcgcttgtgggatctcactgcccgcaaggttgtggtcagcagagatgtactatttgcagaaaatgaactgcaaagggaacaagaagatgacagcacttcgaaggaagttactactgtagagatagatgggaacaacggagaagatgcttcctatgaagctgaaccagagcacgaggtggaacgatatcgtgcaagactggtggttaaaggatatgctcaaaaggaaggtattgatttcaatgagatattttctccagttgttagacttaccactatcagagtagttctcgttatgtgtgctgcatttgatttacatcttgaacagttggatgtaaagactgcttttcttcatggaaatcttgaagaagaaatttgtatgctccaaccagaaggttttgaagaaccaaataaggagaacttggtttgcaggttgaacaaatctctatacggtctcaaacaggcgccgaggtgttggtataagagatttgattccttcatattaagccttgaatacaacagactcagttcagacccttgtgcttatttcaagaggtttggaaataatgatttcattatcttgctgttgtatgttgatgacatgttggtgacaggccccaacaatgatctgattcaagaattaaaggcacatttggctagggagtttgaaatgaaggattgggaccagcaaacaagattctagggatgcaaattcaccgagacagaaataacaggaaaatttggctatcacaaaagaattatttgaagaagatcttgcgacgcttcaacatgcaagattgtaagccaatttctacccctattcctgttaatttcaagttatcctcaagtatgagtcctagcaatgaagcagagaggacggagatgtctcgagtaccgtatgcatcagcagtagggagtttaatgtttgctatgatttgtacaagaccagacattgctcatgcagtgggagtggtcagtcgattcatggcaaatcctggtagagagcattggaatgctgctaagaggattcttgagatacatcaagggaacctcagatgctgcattatgttatggaggatcagaatttactgtcagaggatatgttgattcagattttgcaggtgatcttgataaaaggaaatctactacaggctatgtgtttactcttgcaggaggagcagtaagctggttatcaaagttacagactgtggtggctttgtctactacagaagctgaatacatggcagctactcaggcttgcaaagaggcaatttggattcaaaggttattggaagaacttggacacaaacagcaatcagtgattgtgtattgtgatagtcagagtgccttgcacattggaaggaatccagcctttcattccaggacgaagcacataggagttcaataccattttctcagagaagtagtagaggaaggttgtgtagacatgcagaagatacacaccaaagataacctagcagatgtcatgacaaaaccaatcaatgctgacaagttcatatggtgtcgatcctcgtatggcctatcggagacataaacagcatggaaatggcaagatagaaagaactgtgtggagattgattgattctcaatcatatctccaagtgggagatttgttgaaaaagcacaccgaaagcagaggcgaaattttcaaagtgcacagtaactttttactgtgcacacgcgttttcagcttctatataaagaagcgaattcattcggtttcagtaggtgcagcagcagcagctgcatcccacacttgagttcttctcttctctttgataatattatttgttataatattatttttgagtgtaattttgtgaggagtattccctagttcaagagagagataaaattgttctctccttgtgataaaagggaggttgtagtgttggagttcccatagtgaaattttttctactcttgtcagtgggtttttacctcagggttttcccacgtaaaatatttgtgtccatttattgctttcaatttcctttatctgttgttattgttctgtccgatggaatccggtttattaacacgctgtttgggcatggttagcatttgccttgttttattttgtctcaacataacatgctctatgttgtcattaactttctcatgcctgcaggatggctcctgaggtgctgcaaccagctggaagtggctataattccaagtcagtcagtcattcattcagttcttctttttagctgcctctgccaattaattaccaaaaccctgtattgccatttatgttactgttaactaactcaaaacacatgattattgccaatgtgttttagcattaatggcatggctagtgtattgtattagtttcaatattgtgttgttctgcttggtttttaaatccgttcaactgatttagggtgtgtgaataaatagtttaatcggatgagagcttattatatacttgactgtgaactgtgaagcttgttgaattgaaataagctgaaagagcttattctaataagcttttccatcaagtttattgaaacaagttgttcaattgactgcaaaaccttttttttgtctttactaggattaataatggtatgggccaagtttattgttattgccgatgtgcataaatgttgacagggctgatatttggtcttttgggattacggcacttgagatggctcatggccatgcaccattttcaaaatatcctccaatgaaggtatttacatccagtggttgttcagagacaatgtctagacacatgttaacattggacccattgaagtttatgtgatataatttgtaataaaggaaaaagagagttcacttttatttcatgtataggttcttctaatgacaatacagaatgcccctcctggacttgatgatcgagataaaaagttctctaaggtattgctgttctttctggatgcactgttacacaagagtcatcattatgatacttatagttaattttactggttagttaattttactgttacttctaacattattcgtatgttatatgtggtatgaaatgggaaagtttgatattgggcacaattgaaatgaattgctcatagtggtttattttatttattatgatgagtactgtggttattatgtatgtatttgtagagtgagtgagttttgactgtgggctgctcctgcctctgccgttggtcttatcttttgctgaaacttgaaattgaatctctctcaagcttccttttttaaaaggttagggatcgaagcagaaggaagtaagtaagaagagatgggagtggatttgagacaagtggtggcaggtgtcctcaccctcacaatgtttgtcatgcttggaaatatgatccaaagagaccacactttgataattcacttcgagtaagcacaccctctttttcattttcatttgcatttgctagctcacaccagaaacaacaatataactaaattcatcttaagaatgaaaaccaaagcctttcttccacagagcttatagatcccttgtttacactgacaaactagaactaggagaagagaccataattgttttcaataataacgctttataattgaaccacattccaatatctagcttctttgatgtaaggtaaatataagcttaatgcatataaaaattgtttctaataattaaagtggaaaccatttgtctgatttgtgtttaccctgtgaaattatgtagctttcagcaagctgcagaagactgcagtaaggcaatatggcttgataagaaggtaagaaaatgggcacgcaatcgtggctatgggaatttactttctggtatcttatttctagttagtataatttttaaactccaataatctccaatcataggaatgggatcttcctaatgttgtaccaatgtcttatatcctatcatttttttggtttgaaattctgatcacaccatcttacctcatagatatatgtcattcaaagatgccacttcaattttccaacattgttggtgaatataattctcctgaatatgaagactgcaggttttcgcaagtgtttctgccaggcgaacccccctgggaatcaaatttggagggtacatgccgaaaagcaaaggataaagctaaaatgagatacaatgagaaaaagaaaactcgaatgtgtgtggcgttggtatgtttagttttgattctaaaaaacatgtatgtgtttggttttgatgcttcgagtgcttgttgattagaagtctgcaatctgaatttgacttatccatggaattcatgtcatgttaatatttattctaatgcttataattggttactgtcttgctgacgttggtttagagctatcaatcctaagttcaaagatgaaaaaacacttgagtaacagtagaataatcaactaaataaattaattaatcattgttgtcctaccctgaagtttaatttgtcattatcattcgacatcctcattgtattacatggttttcatggacacaaaatattgaaagctgggaagctgattgagaaagttctgagacttgtgtggagcaaattgtaagaggaacttgaatcttcatttttttttaacttcaattttctcttcttgtttttgaattagtgctgagacaattcatcaaggaattagcaagccacgaccattgagaactgagatagaacaaaaaaggagtgcgtattctttttcatagctatgtcatggttcttatatttttcttttatatattaaactagatataaatttggaggaaacttttttaatatttattaaattatataaaaaatttaattattttttatattattaaaaaataaaattagctcaaatgttcacaatataaagcttatttattaataaaaaaataataaagataaataaatatggttactatttaatacaaatataaaattaattttgataatattgttctcgtgacgtcaaaaaacttttagcaatcagttcatggtgcaaaatgaatggggcaatactctattaatatgtgagcaagtttctttcgaagttttccacatttggagttgacaatcacgattccccttactgggactcatttccctattttattaatttttttttataaaaattaactcatacattattttattataatcatttttatggagatcattaatttaaaatcttataaaaaaatattgaaaaaatattctaacttcaattaaaaaatataaatttaataacacatattttattaattttacacctttgctgtgaaattaaaataaaaatgaaaatagtaacaaataacaaagaaattaattaatagtttaaatagtactctgctcagttatttctattgttacctattcttaaaccaatgatttgatgaaacgtattattttgttccatcttgtaattgcctatcatttttgctgtatattagaattatgtttatatgttgtcataaaaaaaatgttattttcaaattctttagaatttatcatttcgtaagtattatgtttatatgttgtcataaaaaaatgtttatatgctcaatatttgctgtcagcatgacatgatgaaacatgttgcaacgatagtttagtttatccttttatatagctgcaactaagtgatttttaagcatgatattggctatttaatcattttttgtttatcgctatttcttgtgggctaagagcaagtgtcttttatatatatatatatatatatatatataaattatatgatgggtgaaaaaaataaaaaatagtcatttaagacggtcgttaggaaggaaaactgtcttgttttgattttttttatataaaaaaagcatattctaagatggttattagagaaaaccgtcttagaaaaaacaaataatatttttttaaaaaaatattttctaagacggttgttagtaagaatcgtcttagaatgtgacattttaagacgattttctgtaaaacggtctatgaatatcacattttaagacggttctatctaaaatcgtctttgtaacatgcagttcaaatttttttaataatcattttctaagacggttgttaggaaaaccgtcttagaatttgacattctaagacggttcttcctaacaaccgtcttagaatcctcaactttttttttatttttaaaaagtcattctaagacggtttcggagaaaaccgacttaaaattcggattctaagacagttttgaaaaccgtcgtagaaaatcaacactttctatgatgttaactacaaagacggttcaaaaatttgaatggcttaaagaaccatcttgcaagtagtgtactttgatccttaccattatggtcaagagcatttgaaggccatggaagagcacaagcaccgagctcttatccattttctcaagaggtgcaaaaagcctattgagctcatcttccattgcatggatcaagtggttgaagagttgagagactcgtacagtccgctagatccaatttcgatgcacgacacgccgaggttcctgcaactgatgattcttgatggctgttacatgttgtagattttgagagccaatgatagtgttccggatgattatgctgacaatgatcctgtctatggtaaacacgggaaattgtatatcatgcatatatcaaaagtaacatacttatgcttgagaatcagctacccattagggttcttcacacattgattgaggttgaaactgacacaacccaggtaattctcaaatttcttttgcacgttcaagacataaattaataaagtgaaactctaagctataagtgtttgtgctgaatttgtgttttattgtttactagaaggcgtactaattaaggtagcatcgagatggatgtatgaaacaggtcttgagcagcatgctagtctcttcttacagagaatgtgcatacaaacataggggctttagttgaaaccttcttgtaccagaaaaaacatacggaacttgacataatagtttatcataattgataatgccttagataaaagtgatcagcatcttttcattatttggtacagtagatgaggacaaaattaattttctgcaaattttgaatagaaaatggcacggttgtaagtgatatagtttagttagatttttaaacaaaaattcatgaaattttgatttgattcgatttaaatataacattaaatttaaaataaatcatactaattttttatgattgatttgatttagtttcataattttattatctttttatctattatcataacttaacattatcaactaaatttaaataattattatatattatttaatatttattattatttatcataataaaaattaatatttatcttaattatgaaacaaataaaaattaataaattatttaatatttattattatttatcataataaaaattaatataattataatatataatttatttgatttagtttgattttttataataagatttaaaaataaattaaattataaaatatacaatttttatattttatttttgtaatttttatttaaatgatttttatttttttattgatttgacagtttataaatagtttgatttaattttgaatattcctattataaaatgggatcaattaaatgataaatgtttcgtttttctaacactttccgagaaaaaactttcaaagagaatggaaagactccgttttggtctgggtcgtgttgcttgcgttttaattaattttcactttgagaagacaagacatttacgcggttggttagattgtagaacctccaatgtcctacgcacataaaagctgttttgtgcacagcaccagagtcacaatcataataagagagaaaaacaaaacaactttcccctccctcttagatatcacctaaggtcatttccaataaatgatcatgtaagaaattttaagatgaagttatatttttctaggatttaattattagagatcttctcaagatttttatattgaaggaggtatagtttttagaaaaattcttaagatttatattttttaaaaaaatattattgtttagtatctcttctaagtcttaactaattattatggaaaagaaaaaaaaataaaaaaatgaaaaaaaaactagataacacaaacaacataataatataatttaaaacaaataataaaaataaaataatatttatcatcatctgatttgagtggtcatctgaactttttcatcttcttttagaaaagagattatatatatatatatatatatatatatatatatatataattatgataaatgacataatattataggtagaaacatataataatttcttgccgcaacatccccaattttgattgactgatttcgtcttcattgattactcactcaactctcctttttagatttatcctttaataaattacttggccccattccaaccaaaatcaataaacttccacaattccacgttgatagtattctttgacttccttgttactattggatcttagtgataatcattggcggatttaggatttttttgtttatgttcgcacattaatttggtggtggactcaggatttttttttaaatccgctcaaaatatagttatttttataacaaaatgcatataatagtttgatcattgttaacaaaccacctcaaagtaacaattcagaataacttgcacattaacacttcaatcagcagttcagaaaccacaagcttggtattatacaaaacgaaaccaaaaggatgactaattgcacattgacgagaatagaagagagagagagagagaaatcacctcgtagcgagccgcgacggaggacgggtcgggattcgaaggcggaagcggcagtgacagaggtgaggacgcgcaggtggtgacgaaggcgaaagcggcagtgacggaggcgaggacgcgccgaaaataatgttgtacataggggtgcggtgggtgatcgcgaagaggccatgatgggaagccggtgtcgatgcggcagacgacggtgtcggcgcgggatcggaggtggttgtggtcgacggtggcagaggagcctgaagatgcgtcgaccagtgcagagggctgagatgaggaaaaggtagtgtttttaaatttttttaccttttaacagatattataaaaaaaaaatccaaatgtttatgtccgcacttgcgaacataaacatacttgtagcctacatgtatggttttgaacggtttgttagcatgctcgatccgaaggacaacccgacccggtccggtagtcggaccggccgggtcggtccggttttttaaactttgcatgtaggtccgcccctaatgacaaccatctcatggggtcaattcggtaagtttctcatcttattctttgaaatatttctcatcaccttacttgagtggtcatctagacttttttttcttttttctaagaaagggataatatatatatatatatatatatatatatatatatatatatatgatagaaagaaaaatagagataaataatgagtgttaattttatgtttagcaaaataaaatattcaaaaatgattattctttcttttttgatgtccgttcaatataattgtgatccaaaaacagtaaccaaaacacaataaaataaaatgacccacgaaatgggaataagaaagctagcaacccttggtcgcgcttataattatggtccataccatacatactactactacatagtatttgactatttgccattcgctttacaagtttctattaaagaattatcaaacatgttacttgtcatttaaaaataccaactagagaaatgaaaaaataaatgagaaaagtagtaacataaaaaattgaggaattaacttgatggtagactctttttttaacggatgatagactaaacttttaaaatattaatttaattataaaattattgaagaactaagatagtgacgaagaattcttaagagaatcagtgtatattattagattttccaagcaagctggatttcagcataatagtgcatgtatcctaatactgccttggaagaaaaaagatatcagcatgttttcagtatttggtacagtagatggagacaagtttgttttctgcaaattttcaataggaaatggcatgaaaggataaaagtgaaggtatttttttctaacacttcacaacaaaacaactttcaaagacagtaggaagactccgttctggtctctttatctatgggtcgtcttgcattgcacatataagtttctaattaaaatttgatttaactttcgattttaaatcataaactatataaaacaaagattctaattattttcttttggctgcatcttatctctatgcttcaattcatactcttgtgggttgctatttggaatgctcttgggctgtaatgtattattcactggaaaaccccaatggattgcgcgagagacttgttgaaggtgtgctatatgtcagagtgaaaataaaaacaacagaatccatgcaaattgtcgaggaatgaattagtttaatatggttctgtattatgtgggtttatcactatgtatttatttgccgtaagttgtctgagttgtatcctccaaaggcattgaggaaattaaaattcaggcgttcaaccttcaatccgcacaaaatcagcattttattaggaacaaaatcatacagttttcttgaagaacttacattttcgcaattgaaagtacaagagaatcagtgtatattagattttccaagcaagctggatttcagcataatagttcatgtatcctaatactgccttggaagaaaaaagatatcagcatgttttcactatttggtacagtagatggagacaagtttgttttctgcaaattttcaataggaaatggcatgaaaggataaaagtgaaggtattttttttctaacacttcccgacaaaacaaatttcatagacagtaggaagactccgttctggtctctttatctatgggtcgtcttgcattgcatatataattaagtttctaaattttagaaaaataaattagctctgattcggatatgtccaagacaaaaccggacacaatatacagtgcggacttgatcattttatgactcttgaaatgatccatatccatacaaaagggcatctcaactctcaacccttattactatagcgtcttggtcttggatgtgattgagtggtcattgtttttttaactttcttttgatgagctagttccgtttcaaagttgtgcctacaatgacagtagtatatagaaaatagaaaaaaaaaatgtctttcataaaatttgtcttgctacccaaactctcaaacattagaggtaccatattgaaatttgacatatactattttaataaaaatgatgcgtcttgattcaagtaatttatttatctctttaatttattatttaataaaattgattatttattattaataatgagaattttttttatatataatacaaataatttttttttgcaaccattttttcctctttagtaccatacgtgagtatacaaaattaatgataacaagatataagtaggttagattggccaactcataccccaaagttaaacataatgattgtcctcaaacatttgaaagagtggaaatacttcacacttcaaacaaaattttattaatcactctaatttagattaacatgatctataaaaatctactcaacctcaacaaaagagattaagctaacataaagaaaaatgaagagaaaaaagagaactctataattgtagctaacatcctcattaattaacttgagaatcacagtcagtccttattgtagctaacatcctcatttatgaaatnnnnnnnnnnnnnnnnnnnnnnnnnnnnnnnnnnnnnnnnnnnnnnnnnnnnnnnnnnnnnnnnnnnnnnnnnnnnnnnnnnnnnnnnnnnnnnnnnnnnnnnnnnnnnnnnnnnnnnnnnnnnnnnnnnnnnnnnnnnnnnnnnnnnnnnnnnnnnnnnnnnnnnnnnnnnnnnnnnnnnnnnnnnnnnnnnnnnnnnnnnnnnnnnnnnnnnnnnnnnnnnnnnnnnnnnnnnnnnnnnnnnnnnnnnnnnnnnnnnnnnnnnnnnnnnnnnnnnnnnnnnnnnnnnnnnnnnnnnnnnnnnnnnnnnnnnnnnnnnnnnnnnnnnnnnnnnnnnnnnnnnnnnnnnnnnnnnnnnnnnnnnnnnnnnnnnnnnnnnnnnnnnnnnnnnnnnnnnnnnnnnnnnnnnnnnnnnnnnnnnnnnnnnnnnnnnnnnnnnnnnnnnnnnnnnnnnnnnnnnnnnnnnnnnnnnnnnnnnnnnnnnnnnnnnnnnnnnnnnnnnnnnnnnnnnnnnnnnnnnnnnnnnnnnnnnnnnnnnnnnnnnnnnnnnnnnnnnnnnnnnnnnnnnnnnnnnnnnnnnnnnnnnnnnnnnnnnnnnnnnnnnnnnnnnnnnnnnnnnnnnnnnnnnnnnnnnnnnnnnnnnnnnnnnnnnnnnnnnnnnnnnnnnnnnnnnnnnnnnnnnnnnnnnnnnnnnnnnnnnnnnnnnnnnnnnnnnnnnnnnnnnnnnnnnnnnnnnnnnnnnnnnnnnnnnnnnnnnnnnnnnnnnnnnnnnnnnnnnnnnnnnnnnnnnnnnnnnnnnnnnnnnnnnnnnnnnnnnnnnnnnnnnnnnnnnnnnnnnnnnnnnnnnnnnnnnnnnnnnnnnnnnnnnnnnnnnnnnnnnnnnnnnnnnnnnnnnnnnnnnnnnnnnnnnnnnnnnnnnnnnnnnnnnnnnnnnnnnnnnnnnnnnnnnnnnnnnnnnnnnnnnnnnnnnnnnnnnnnnnnnnnnnnnnnnnnnnnnnnnnnnnnnnnnnnnnnnnnnnnnnnnnnnnnnnnnnnnnnnnnnnnnnnnnnnnnnnnnnnnnnnnnnnnnnnnnnnnnnnnnnnnnnnnnnnnnnnnnnnnnnnnnnnnnnnnnnnnnnnnnnnnnnnnnnnnnnnnnnnnnnnnnnnnnnnnnnnnnnnnnnnnnnnnnnnnnnnnnnnnnnnnnnnnnnnnnnnnnnnnnnnnnnnnnnnnnnnnnnnnnnnnnnnnnnnnnnnnnnnnnnnnnnnnnnnnnnnnnnnnnnnnnnnnnnnnnnnnnnnnnnnnnnnnnnnnnnnnnnnnnnnnnnnnnnnnnnnnnnnnnnnnnnnnnnnnnnnnnnnnnnnnnnnnnnnnnnnnnnnnnnnnnnnnnnnnnnnnnnnnnnnnnnnnnnnnnnnnnnnnnnnnnnnnnnnnnnnnnnnnnnnnnnnnnnnnnnnnnnnnnnnnnnnnnnnnnnnnnnnnnnnnnnnnnnnnnnnnnnnnnnnnnnnnnnnnnnnnnnnnnnnnnnnnntataatatgcatgttgtggatagcttgaacggttctagcaaaagcactactaaattgggtctcatttttggatatttgtagactagagtttagatatattcaaaatatcacaagatacgtgtttcatccgaagaagactattattaatcaaaaataatataaatggagtaacaaaattatatttagaggaaaccataattaatttaaacattgtcacgataatcaattagtagcaaaattataaatgtttagactttttaattgttggcaatataaaaatattatctaagtaacaaaattaatttgataatgatttacaaatatattattatattacaggcgaaggaagaaaaagcaaagaaagagttgaatcgaaatgaaaggctttgaagcagcgtaggctataaatagaagtttgtgaattgaattggttgtatccaaaaatcgtctctagttttgttgttgagttgaaaggatgaatatgaataacaatgtttggtggcttctactcctatactctatcctccttcttctttttcttccttcttcttcttcatctttctgcaaccaccatgacagctctgccttgctacaactcaaatactcactcaacacttcaaatgacacttcaaatgattttccttccaaagggaccaaaacagaatcttggaaaaacggcacagattgttgtgagtgggatggggtcacttgcgacatcatctcaggccacgtgattggtcttgaccttagcttctgtaatcttgaaggtcaactccatcccaacagcaccatcttcagcctaagacaccttcaacgtctcaacctagcctttaatcatttttatggctcttcaatatattctggaattggtgatctcgtgaatctcatgcatctaaatttgtcatactctggattcactggtcacattccctccacaatttctcacttgtccaaattagtgtcacttgatctaggtagcctctactttataattcttgatcccaactacccgagaatgagaattgatccatacacttggaagaaactcattcaaaacgcaaccaatttaagagagcttaatttaggtcgcgtggacatgtcttgtatcggagagagctctttgtcattgctaaccaatctctcttcctctttgatctcccttagtctccaagacaccaaattgcaagggaatctatcgagtgacatcctctgtgttagaaatatgtttagaagtcccacatcatctatatctctttgtatatgtcctttagtttattatataataggtccaatgttgtgtagttaaaacacaacaaagattacaataaattccttttgtatctcttgatatttaacatggtatctagagcctaacaagaggaacgtaatcaatttctttttccgatgaactcaatgttcttcggattttcattttctttctttttctttccgcacaaggttttcttagtatgctctgtgattgcagcttagactgatctatcacatcagaaaagaattatccttaatcggaacctccgttagccactattctgttccatcaccggcgagcactattccggcgacactattccggtgacactattccggcagcactattccagacacactattccgacggacacacaaaagctgccgcacacgctccctggtccggttagtttattttttctgatttttattctctaagtgagtatggattccccaacctcttccatttctggaacttcggctactcctaagtcagagaatactattttttcaaactatatccttgctccgctgagtgtagaaaaattagatgggtcaaactatgattcttggtcgtcagatctacgcctttggttggatggacaagattacacatctcatctcactactaaggcagattctattacagcaaatgaacgtacaaaatggaagatgattgatgcccaattgtgcagtctcataaaagctactctccatccatcaatcaagcagatttttagacctgcaaattcctgtgaagcagtttggagtcaggcaaaggcattgtacaccaatgatacacaacgactctataatgtgtgtcagaatttaatgactacctttgcccctcgggatttcacttgtcccatgtcggaatatttgggacgagctcagagtttactccatgatcttaatgaacttttacctcctactggagatgctaccagggagcgagaacagcgtaatactctttttatgttgttcattttatatggtttaccttctcatttttcagccaatcgagatcaaattttggggtctgctacagttccgacattggattctgtgatgtctactttgcttagaattccatctaagccttctctatcatcagcatccactttgagccatgtacctctgattgacaccggtgattcctctgcccttgctactcaaggttatggacgcggacgtggacgcggacgtggacgtggaaagtctttttgcactcattgtcaacagaccaatcatactattgaccgttgttggaagctccatggcaaaccacctccgcctcctagaagcgnnnnnnnnnnnnnnnnnnnnnnnnnnnnnnnnnnnnnnnnnnnnnnnnnnnnnnnnnnnnnnnnnnnnnnnnnnnnnnnnnnnnnnnnnnnnnnnnnnnnnnnnnnnnnnnnnnnnnnnnnnnnnnnnnnnnnnnnnnnnnnnnnnnnnnnnnnnnnnnnnnnnnnnnnnnnnnnnnnnnnnnnnnnnnnnnnnnnnnnnnnnnnnnnnnnnnnnnnnnnnnnnnnnnnnnnnnnnnnnnnnnnnnnnnnnnnnnnnnnnnnnnnnnnnnnnnnnnnnnnnnnnnnnnnnnnnnnnnnnnnnnnnnnnnnnnnnnnnnnnnnnnnnnnnnnnnnnnnnnnnnnnnnnnnnnnnnnnnnnnnnnnnnnnnnnnnnnnnnnnnnnnnnnnnnnnnnnnnnnnnnnnnnnnnnnnnnnnnnnnnnnnnnnnnnnnnnnnnnnnnnnnnnnnnnnnnnnnnnnnnnnnnnnnnnnnnnnnnnnnnnnnnnnnnnnnnnnnnnnnnnnnnnnnnnnnnnnnnnnnnnnnnnnnnnnnnnnnnnnnnnnnnnnnnnnnnnnnnnnnnnnnnnnnnnnnnnnnnnnnnnnnnnnnnnnnnnnnnnnnnnnnnnnnnnnnnnnnnnnnnnnnnnnnnnnnnnnnnnnnnnnnnnnnnnnnnnnnnnnnnnnnnnnnnnnnnnnnnnnnnnnnnnnnnnnnnnnnnnnnnnnnnnnnnnnnnnnnnnnnnnnnnnnnnnnnnnnnnnnnnnnnnnnnnnnnnnnnnnnnnnnnnnnnnnnnnnnnnnnnnnnnnnnnnnnnnnnnnnnngcaactcaacctccaactactcttcttaatgaatttatgacttggtggtctgaaaaacaaggatctggtcccactacttctattgctccttctggtaattcttttgctgctgtctctcaatcacaatctttaggccattggactcttgattctggggcttcagatcacatttctggtaataagtctttattcagttctctttgtaccaatggtttatttccttctattactatggctaatgggtctatggtccaatcccgtggaattggcacagttcatctttcaccccacttatctctggatcatgtactctatgttccagattctccttttaacttactttccattagtcgcttgacaaaatccattgattgtgttgtttcctttactaaaaatgctgtcatttttcaggaccggagttcggggaaggagattaccaaaggacgtgagtctcatggtctctatcagttgttttcttctgcttcagcctgctcttctgtggattctcctctcactatccatgctcgtttaggtcatccaagtctaataaagcttcggaaaatggttccacatttatcgtctctctttagtttaaattgtgagtcatgtcagcttgggaaacatagtcgtagttcgttcccaagtcgtcttaatcgacaagctttgtctcctttttctgtggttcattctgatatttggggaccaagtcgtcatccttctactttggggtttaagtattttgttacttttattgatgattattccagatgcacttggttatttctaatgaaaagtcgttctgagttattttctatttttcagttattctataatgaaataaaaaatcaatttgatgttcctatccgtacttttcgtagtgataatgcatctgaatacttatctcatcagtttcaacaatttcttgcatctcatggcattctccatcaaacatcttgccctcatacacctcaacaaaatggagtagccgagcgcaagaatcgccatcttgttgaaactgctcgctctttattaattgatggaaatgttccttacaaattctggggtgataccattctcactgcttgttatctcattaatcggatgccctcatctgttcttagtcaccaggtaccacattctattttgtttccccatcaagttttatatcctttggccccacatgtgtttggttctacctgttttgttcatcatctcggcccaggattggataaactagctcctaagtcccataagtgtatttttctgggttatcctcgatctcagaagggttaccgctgctactctccaaccttaggtcgttattttatctcggttgatgtctctttctttgaatcagttccatttttttgctcttctactactgttgaaaacgatattgttcagtcacctctaccttctgactcttttgagtatcttccaccttcaccaactgatgtttcttctactaatgagcaacaagtttcttctccagaagttcctatggactcacatctgactacatctcctccttcggcttcggtcccacattctgatagtaaccttcccattgctcttcgtaaaggtactcgtgatactcgccctccagcaaggtatgcagttaatagtagttatcatcgtctttctccatcatattatgcatatctttcctccttgtcttctgtctctattcccaaaactacagaagaagcactttcacattctggatggagacaagctatgattgatgaaatgagtgctcttcatcataatggtacatgggatctggtctctcttcctcctggaaaatctgttgttggttgtcgctggatttatgctgtaaaggttggtcctgatggtcacgtggatcgccttaaagctcgcctggtggcaaagggttttactcaggtatttggattggattatggtgacaccttctccccggtggcgaaaatgtcttctgttcgacttttcattgccatggctgctatacgtcactggcctctttatcaacttgatgttaaaaatgcttttcttcatggtgatcttgcggaggaagtttatatggaacaacctcctggttttgttgttcagggggagtcaggtgtggtttgtcgtctccgcaagtctttatatggtctcaagcaatctccacggacttggtttggcagatttagtagtgttgttcaacaatttggtatgactcgaagtgaggctgatcattctctctttttctgtcattcgacttctgggtctatttacctggtggtatatgtggatgatattgttatcacaggtagtgacagtcatgggattactcagttaaagcaacatttatgtaataagtttcaaaccaaagatcttgggaaacttcgatatttcttgggaattgaagtagcccaatctaaagatggtgttgtaataactcagaggaaatatgctctggatatccttgaagagactgccttattaaattcgaagtccgttgagactcctatggatccaaatgttaagcttatgccaaatcagggggagcctctttcagatcctgaaaaatatagaagattggttggaaaactaaattacctcactgttactcgtcctgacatttcattttcagttagtgtggtgagtcagtttcttaattctccatgttaagaacactggaatgcagttattcgaattcttaagtatatcaaggcatctccaggaaaaggccttgaatataaagataaaggtaatgttaaagttattgcatactctgatgctgattgggctggttgtcctactgatagaagatctacttctggatatgctgtatttataggaggcaacctggtttcttggaaaagtaagaagcaaaatgttgttgctagatctagtgctgaagcggaatatcgatccatggcaactactacatgtgagctcatttgggttaaacaacttctcagagaactcaagtttggggatactggaccagcaactctcatttgtgacaatcaagcagcactacatatctcctccaatccagtgtttcatgaaagaaccaaacatattgagatagattgtcattttgttcgagaaaatgttctttctggtgaaatcataactaattttgtaccatctaatgatcaattggcagatatatttacaaagtctttgaggggtcatcgaatagagtatatatgtaacaagcttggtgcttatgatttatatgctccagcttgagggggagtgttagaaatatgtttagaaatcccacatcatctatatctctttgtatatgtcctttagtttattatataataggtccaatgttgtgtagttaaaacacaacaaagattacaataaattccttttgtatctcttgatatttaacactctgtttacccaatcttcaacatctaggtttggattttaataaagacctcggaggtgaacttccaaagtccaactggagtactccactaagggacttgagtctctctggtactgctttctcgggaaacattcctgattccattggccatttgaagtctcttaacgcactagaattgtgccgatgcaattttgatggactggtccctcatcattgtttaatgtaactcaactctcctttttagatctatcatttaataaattagttggccccataccaagcgaaatcaatagacttcaaaaattgtggtctctagatttgtctgaaaacaagttaaatggaacaattccacgttggtgttattctttgccttccttgttaattttggatcttagcgacaaccacctcacggggtcaattggtgaattctcatcttattctttgatgctcttggcactctctaataacaaactgcaaggtgatttgagtggtcatctggactttcatcaattttcaaagttcaaaaatctatcttacctcaatctttctcacaatagttttctctctattaactttgataataccgctgactacatcttacccaaccttcaacacttatatttatcttcctgtaatattaatactttccctaaattcttagcaccacttcagtatctggtcggactagatctttctcataacaacatttgtggaagcattccccagcggtttcatgagaagctcttgcactcctggaataacattcagcttattgacctcagtttcaacaagttgcaaggagaccttccaatttcacccaatggaattgtgtactttttagtctcaaataatgagctgaccgggaacattccttcagcaatgtgcaatgcaagctccctcaatatactcaacttggctcataacaacttgacaggccccattccacaatgtctgggaacatttccttctcttttggcattggatttgcaaaacaacaacctttacggcaacatacctgggaacttttctaagggaaatgcatttaagactataaagttgaatggcaaccaattggatggaccattaccacgttctttgacccactgcacaaatctgcaagttttggacctggcagacaataacatagaggatacattcccccattggctagaaagcctccaggagttacaggtactcagtttgcgatcaaataagtttcatggtgtcatcacttgtttcggtgcggagcatccatttcccaggctgagaatttttgatgtctcaaataacaattttagtgggcccttaccagcatcatacatcaagaactttcaaggaatgatgagtgtgaatgacagccaaactggtttgaaatatatgggtaacgacaattactataatgattcagtagtggttgtaatgaaaggtcgatccatggagctcgagaggatattaactattttcacaaccatggatttatcaaaaaatatgtttgaaggagaaattccaaaagtacttggagaattgcattctctcaaagggcttaacctttcgcacaatgcaatcactggtaccataccacaatcctttggtaatttaaaaaatttggaatggttggacctctcgtggaaccagttgaaaggagagattcctgtggctttgatcaatttgaattttctggctgtgttgaacctttcactaaaccagtttgagggtatgatacctacaggtggacagtttaacacatttggaaatgattcctatgctggaagtccaatgctatgtggattccctttgtcaaaatcctgcaataaggatgaagatcggccaccacatcaacatttcaccatgaagaatcaggatttggctggaaagctgtagcagtgggctatgcatgtgggttgctatttggaatgcttttgggatataatgttttcatgactgggaaaccacaatggctcgcgagacttgttgaaggtatgcttaattaacgaagaatgaaaaggacaaatcataggggaaggaaatagtttacccttagtttaatatggttcttttgtgtgtgtctgtatgttttctgtaattttacttctgtcctttgtgtaacaaatctcatctctcttgagtgacgtatttcaagttgtttacaaataagaaaaaaatgtgatgatcgtagataccaaaatgagtggtcttcacatgtcatgctattggctcaaaaactttgattctaatctccaaagataaaaacttattagccaatagccaccaattgtatgtcaagcatgccatggtacgagctaagattaaaactggacttttaatttaaaaattggtttcccctacccctattacatactttctccaaacaactatccctaaccaactgagtcaattattgattaaattttgctgcatgatgatcgtagatgcgcccatggcaatgtgtccttttgggaggttccttgagtgaaaataaattaaacaaagtccccataacaatagccttctaataatgctctaaaagctggcacctttgcgaggctttcattaatttgaaagttaaaatggtaaatatttggaccaataaaatgaaacaatattgaccatactagtattcacacagcaaatatgtggcaattgttcttgaaatcaactttattgtctgacagtattcggatcgatgtatttctgggattggtttgtatagggagattttttttatcacaaatattaattattagtattgttaatttttgtgtaggaaagttatagcttgtatacgtgttggatggattttttttatatgtatacataaattgtatttgttaggttatcccatatatcaatattctcttttttttaatgaatattctctcttttttgctgagaaaaaaatagtattcgcgattttattatttagttttgcatttcaaaaatttataagatccaaaaaatgaaagcaaaaaagggtgaagttttaacggtaatccaaccaaattcgcacttacattttaatgtatatgaggatattaactacttaactaccttcacaactattgacttacgtttgtcacttcttctcaagatgaggttttagcagtaattcaaccaaatgtgtacatgcacaagtttagggtgcttgacttaaaaccttcttcaagtgtacctgttatagaaacatatattgaagttgaaatactgctcttcccataatattagctaaaagattctgattctcagctctaaagttaaaaatttagaagcaggagcttataacaagcaaggtataggtctggaattttatgaactcacgacgaaatattaaataaaattcttttgtatttaagtatttaaaaatagacatatatataatatcataacaaatgtacattttatttcactaaataaataatataattttaataaatcttaaaaaaaatatcatattttttatttaagttgctcttatattattatctattattcaatttctatctcttaaaaaatttgcatacacataaatttttatatataaggtagacatgacaaataatggacaaatggagagacatgtttaactatctttatccaagttctttatgaaaatattaattttaattttttttattttataattttaatttttttgtgtttctttcaatatgttgatatatcaatgaattaaaaattcaatcaatatgaagttatgattgtaaaatgttagaaaaattaattaaaagagtgacactttttaataatattaacatattttaatttaaataaaaattgaagcgtaaaataaacaacaactttaatttatttatatgaatcttttaagggtgacgatgtacattgtgatgtaatgagcgaaaactgggaggagcaagagcctgtacttgtacaaacaaagcgccagtcccggaaaaacattccattgcctagcaaacatagcggttcattatcatcttgaatggatcttctcatgagcattaatgaccacaggtattggagttttgaggtaaatgaacaaattagtgaatttgaatttgatgaaaatcacatgtataatgcacagcataaaactagagcattagatagtttgaatttcactattggtggcactgctgtatgatacccgaactctactctcttttttctgtatataaatcaaaatctagagaatttttaaatgaagtatataacagaaatattcaggtcatattttgacagtctgatgcgtgaaacaagttttctagcatagtgcagtttgagatctgatggttgataatgttttaactaaaaaaaattacttttaaaaactccctctcttttcataagttgagataattttataagttgttttttttaaggaaaaaaaaatccttcccttttttttgtttaccaaagtggatggattaaaaaactgtggaccacgtgtttttgcagtcactttccgttatatcaaacagagcttaaaaataatctatttaatgaatattcactctgttttctggaaaaaaaattataatattctaatcttattattcagttttgcattttaaaaatttataagatccaaatttgcacttacattttaatgaaagaggatatcaatacatgtgataacccaacaaatacaatctacgtataaattaagtgattaactaactgagaattttattactcgatctcctaataacaaatgagggagaagctgatcgtttcattccgagaagatatgaaaatgagtgtcatcccatattattggctcaaagacttcgattcttatctccaaagataaaatcttatgagtcagcacttgtatacagaccacagacgttatacatatgacgggtcaagcatgccatagtgattgtaacttataagagcagtcattaaaactggaaactggacttctattttaaaaattggtttctcctagccatattacatgctttctccaaacaactatccctatcaaagtcagaccaattcttgattaattttgctgcatggtgatcgtagatgcgcccaagccaatgtgtcaccataacatcaaagtcaccataacaatggcctggtaattttctaagggctgccacgtttcatatttgaaagttgaaacgatattgatagatatttggaacaaaaaaagaaacaatattgatcatactaatatgcacacagcaatgaattgatcttgaaattaaaaacatagtcctacttctgaaatttatacaccctagcaatgtccaaatattgaaaacaaatttattcactgatactatattcagatcctattattcagttttgcattttaaaaaatattggaaacctattaaaaatttatatcaaaagataaaacaaataaaaagcaataatagcaatatactcttgtgtaacatttttattattatgggctaaatttgatgtcaattctattataaaatttgagtgatggaatttacataaaacccactcaatgattaaagatttatcaaaaggactttctagcatttcacaactgccaaagagtttacagactccattttggcatctcaaatccatttgttaaacgtaatttttcctttaataaaatggctcacgtgaaacgtgagtcacactctctccactttaattgaacattctcatcatctatattctggacgtgaatttcaaacattatttctgtaaattaaaacgtctcaaactctcattttgctttatctgtatttgtnnnnnnnnnnaatttattcactgatactatattcagatcctattattcagttttgcattttaaaaaatattggaaacctattaaaaatttatatcaaaagataaaacaaataaaaagcaatatactcttgtgtaagatttttattattattggctaaatttgatgtgaattctagtataaaatttgagtgatgggatttacataaaattcactcagtgattaaagatttatcaaaaggactttctaggactttctagcatttcacaactgccaaagagtttacagactccattttagcgtctcaaatccatttgttaaacgtaatttttcctttaaaaaaaatggctcacgtgaaacgtgagtcacactctctccactttaattgaacattcttatcatctatattttggacgtgaatttcaaacattatttctgtaaattaaaacgtctcaaactctcatttttctttatctgtatttgtatgtttaaacattttatcactattttaaaattgaattttaatagttcttataaaaacagattatcaatagttaaacatatcatatcataatttaaattattcattataaatttaaaatataatttatatattaaaaaaattactgaaacaatttttataagctgaatttcaacaatatttatttatgatgattttaatgatataaaaataaatttaatatgattctttcgcgtgcgatgcgtgttgttttatgtaattttaacttttgcctttttggaagaaatctcatctatcctgagtgatatatttcaagtgttttgcaaataaaaagaaaaaaatgtgatgaatacttttgttttaatttcaagtaactaattttccgtaaattatctagggaaacgtgtataaggatcaaggaacatttgtacattgaactttcaatcgacccactattggcattatattaggaacatatatttactgttttctggaagaatttaggctaacacaattaaatgtacaattgtatcattgtattttcagatgtagttagttcatgatgaatgttgttcaggcatcaaagctactgagaaaagtagaaaaagaaaattgaaaattgaaagtaacataagaataaaaataatttaatttttaatacaaggtaattagctccttaaggttactttctagcatcattccaaagtcttccttttcttttggctgcatcttagctctctgcttcatactcttgtgggttgctatttggaatggtcttatgatatggaatccaactcaccaagactcccaccattatcataaggttcccaccatcatacctttcaccaccaactcacatccataattcaagttttcttttctttatttaattgtaccactttctttatttaattctagaattactactataaataggagtatcatcaagcattgtaacacacaacaattcatttgaatacaagaacaacaagttcttctcttttctctctagtccttttagttcctgagccatcttgggctgtaatgtattattcactggaaaaccctaatggattgcgagacttgttgaaggtgtgctatatgtcagagtgaattgaaaaaaacaaacaacagaatccatgcaaattttcaaggaatgaattagtttaatatggttctgtattatgtgggtttatcactatatatatgtatttatttaccgtaagttgtctgagttgtatcctgcaaaggcattgaggaaagtaaaattcacgcgttcaagcttcaatccgcacagaatcagcatttgtttaagaacaaaatcatacagttttcttgaagaacttatattttcgcaattgaaagtacaagagaatcagtgtattttagattttccaagcaagctggatttcttgaagaactgatcagcataatactgtgttctgctcggtgagaacagaaatgtccaacaatggtgttggaggatttaatgtaggatcaaactctctctctctcaagaagcttatgaatacgaaaccacttgaggaagaagatcaccgcacaaggaacacgacacgttgagggggtgcagtgtgtgcaggtgtgaaggaaaagagagagctagaaaatgtgtaccgttcaccatgactgaagaagtatttataccagggtgcccatgaggcggttgaagctcgtgatcttatgccatgcggttaagcttgaaaccgttctccttgatatgcggagatatgggttcgtgggagataacaaacttatcccacctttcggggtggttactgtgggccactatcagtcgtttgactgctttaaagggggagataacaaactcccgtaacagatgcccctcagcccggtcttctagcattctggatggccgggatgtatcaataatgctgccgactatgctttttaggtactacccacgcagggccgagttcgaaatccgaaccgacgtgaccatcatccgaaccgacatgctcaccacccgagccgaggaagttgagatccgagccgaggtcatctctatttgtattgaggcgatcgaggtcgttccgaggtgacccctgtccgagccgttttatctttacttagccgaggcacacactatccgagccgacacgatcaaggccgagccgacataaccatgatcaatattgtcgtatagtatcgatgccccttgtcgggatatcatatcttctgtcaattcatcaatcacttcaatatcgtcgccgagctactccttgtcttttcaatgcagcctctgccgctactgacctaggggaatggaacgtctccaacttccttatcgccacgtgtcttagtaactgctgattttcaatcatgacttttggggctaaaagacaatcttgcccctatacccagcagttatcacttatgatttcaaattctggcggttactttttcatttaatgcgccttttccgttttcatcgtattaaacctgacttcaattctcattcctctctgtctcttatacttttgcattttctccttactgtgcttcttcgtttcttcttcctggctttcgtctccttcatcgctgttgcctttcccattgcttcactgagttgctcgtgtctgatcatcaacccttctttcttcctcctttccaggtattccgcgcgtctctttaatctgccactttactgtttcgtatttcatcattagcatttcttaatctttgcatttcctttctctgcctttcatcctcttttcttcctttttcttggccttaagcatgaagtatactcctgagcaagaagaggaaatctggaaaacggtttctcctcgtactgctttttggctttttggattgcccctttctgaggaggaaaaaagaaagtctctgcttagggctccctctgccccaggaaattccagggtttcccttcctagaccccttaacccttccagattagggccttctaggttagggccttctaggttagggccttctagtttaggatcatcatcccgacaaagacccgcgctccttgctttgcaatctaaggcctctcctagggtttcccctcctccagatactgctgctctgggtgaatccgaagcctacccgatacccgaaacggattcagtgattcggtatgaacactgtccacgttgtatagaggagtttatatatctcgccagcatagaccacgataggcaagccgagggagtgttagaccgatgccgacataaccctgtttgggttcgtaagtctgttccaaaagaaacaaatattcctccgacccaaccgagccgtgataccgggatgccgacctctgttgaacaaccgatttctgctgaagaccctaaccggccaattccgacctcttcttctcttcgtcctttgacgaccctttcaggtacttcactaataattcttttttgttatcgtaggtgattatggactcatctcgggccagaagtgttgatgaatccgcaactgggtctcggcctcaagttccttctcccgcgctaacaggtaggtttccttgggtaacccatgaggtgctacaacacacctctactatggattccgaggaccttgcttcaattcctttggaggttcaagaaggtttccacgtctgtcttccccgcccgggtgaaccaatttgttcttcccgagaggggaatgaccccgacttctttctgttttataaagatgtcgtcactcggttgggagtttattttccctttaccgacttccagatgcaggtattgagtcatctgcaagttgctccttcccagattcatccgaacggctgggcttttatgcaagccttcgagattctctgtcaaaaactggaacttgtatgtacccgtcctttgttcttttatttctttatggttcaaacaaaccgatccggtaaggaacctgccgaccgaaaaggttggacttcttttccggggtcgcactgatcatcgttctgatcgtcggcttttttctctatacgctgagtcctttaagggcttcaaagataaattttttaaagttgtggccgaacctggtcaatgtcccttttttgctctccctcctgggtcttcctcggaatcctggaagtttcccctgtattggtcttccgtccatcatgaccttccttcagcctcttatcgaaccgacgaggctcagttgtcggattctgacgccacgtctgctgcccgaataatttcatacaaagagtcgggaaacttggcccctatatcttactatgttcggtgtggtcagtcttaatgccttttgaaaataaatcttgaatgattggcttttttcttgatgtctaatactttgatgtttatgcagctgtcgaaatgaaccccggccgtcctcctcgacccccccacctagaagccttaaaatctcggaagaggcgaaggttggccgaggggaagagtaaggccacacccggtggctctgaagtcgccccggtttcgaccgaggttgccgccgaggcccctgcatctcctctcccttctgcttcggtggccgaaacctccgtcgtcattttggatgggccgtcggacgacgctcccttggatgctccggttttggaggatgctgttccttcctcggagtgcgagccgaccgaggatcctcagcagctgtctccccggtctctatggacccatggtgtgaccgcagacctcttggcggcggtgcgggcccctaggaaatattctgacatggttcctctttcaactcccgagttagaagaactcggtttgttggaggtgtcatgtatgaagaccgccaccttgctaagaagcttggccgcgctgaagaaaaagtccgccaagatgtctgctgaattcgaggcctccaaggtcgagaatcaacggcttcaacaagagctggatcatgctctcaaagaggtggacacatctcgggcggaggccgcagaggcgcagggggcggtggtcaggctgaccgccgatcttgaggagtcccgagcagctcttgaggcttctcgggtggagaccgactctgctcgtgccgccgttgcaaagctggagcaggatctcgtggctaaccgggggagagctcgggaggctcgcgatcgttgcgatcagctgctcgcccttaatgagaagaagtccctggagcattccgagatgctgagtgaactcttgttcgttagggctcaattatcgaaatctaccgaagcttcttttaacaatgctttggatcagattcgctttttgaaccccggcattgagttgaacacctcgggtatgcacttcaaatcttatgtcgggaacggtcagctgttcaccgcttccgacagcgaggatgaagaggcgagtacggatgcacccgaggagaccgggactccagttgacggcgggaactgaagggccgggatgccggtttcattttgtatattttgaacagttccttttcctgtatttgaacaagtatttttgcactttttaaagtacatttcgtcggcttttataacttgctgtttatttctaccgtatattggctccaacggccaacttgctagtcggttattatcgtcggtttagccatattttatttaacccgaattattcaatcggtattaaaaatagaatagggatcatgttcccgtcttagcaactgttaatatattcataactttatcctttagatgtaattctttcggaaaaatccgatgattcaccctggattgaatagttacgccggcctgatcaagaccgagttaatataaaacaacgactaagcgctcataattcgtgcacgaagaatgttccttgcattaaggattttattaatagttcatgatatcaattacatctttgcgcgggtgtatgttcccggttcacaattgattgatacaaacatgaaagaaatttcaacttgacctcaaaatagatttgcgcgggtgtatgttcccggttcacaaaatctaatgaaagtcactaatgccatgatcccaatgacgggcccgagggccaactaaagggaaacacatggtgtccatgattccgatgacggacttaaggtcggctaaagggaaacacatgatggagtttcatgatcccgatgaccgactagaagccaactaaaggaaaacacatggaccttgtccgcttcttgtcaactatagtacttctttagcttgtctgcgttccaagttcgttggacttgcttgccgttcaatgtttccaacaagtaggctcctcggccaagattttgggttactcggtacggtccttcccaatttgccgctagcttcccgtctcgagcatttttgttcccgatatctgctcggcgtaacacgaggtcgtccttttcaaaggacctcggcttcacttgcctattaaatctttgcgccagcttgcttttttgatggaggtcctgacggtgggcggcagcgcggacttcttctatcaagtcaagctcggcggttaaggcagcattgttgtcactctcttgtgatatatgccgccttctccatgatgattggccgatttctacaggaatcatggcttcacagccataggtcatcctgaatggggtttcgccagtagctgtttgggtcgtcgttctgtaggcccaaagtacgtagtacagttgctcgacccaattcgggccggcttcatgcattcttttcttcaatccatcaaggatgactttattggccgcttctgcttggccgttggactggggatgttctactgaagcaaaatgatgtttgatatggaggccggtcatcgttgcttggaatgttctgtcggtaaactgcgttccattgtcggtaatgatttccgccggaatcccgaaccttgctattatagcccgctccatgaacttttgaacccgagctgaggtgatggnnnnnnnnnnccactattagccatcgcatttgaccctcagtagctttgaacggtcccagcaaatccataccccatttgtaaaacggccatggtgcagtgatcaaactaagctcggacggaggggtccatactatctttgcatgtttttggcaagcgtcgcaccttttaacgtgttccgttgcgtcggctttcatcgtcggccagaaatagcctgcacggagagcttttagtgccaaagccttagcgcccatgtgttgtccgttaatcccttcgtgtatttccgaaagcacatactcggcttgatccgagttcagacatagtaatagtgggctatgtagacctcggcggtataattcatcgtcgaggattacatacctcgccgcttctcggattaacttttttgcctctagctcctcgtccggggtgattccttgctccaaatagttgacgatgggtcttctccagtcgttcgcgataaatatgatcatgacgcatgctggtcgggcgagttcctgttggataactgatctatagtttcccgccccttttgtgctagccaactttgagaggatgtcggctcgggtattttcctccctcgggatgtgggcaactatcacttcgtcaaattccgccataatttccttcacttttgccaaatatttggctagcaagggacctttagtctgatatctgccttcgatctgcgcggaaaccagctgcgagtcggtgaagacgttgacccttgttgctccttgctccttaacctgcttcaaacctgcaatcaaggcttcgtattccgcttggttgttagaggtcggaaaattgagctgaagggactgttcgagggataccccgtcggggttttcgacaatgaccccggcaccgcttccttttgtgttggatgagccgtctacgtatacnnnnnnnnnnnnnnnnnnnnnnnnnnnnnnnnnnnnnnnnnnnnnnnnnnnnnnnnnnnnnnnnnnnnnnnnnnnnnnnnnnnnnnnnnnnnnnnnnnnnnnnnnnnnnnnnnnnnnnnnnnnnnnnnnnnnnnnnnnnnnnnnnnnnnnnnnnnnnnnnnnnnnnnnnnnnnnnnnnnnnnnnnnnnnnnnnnnnnnnnnnnnnnnnnnnnnnnnnnnnnnnnnnnnnnnnnnnnnnnnnnnnnnnnnnnnnnnnnnnnnnnnnnnnnnnnnnnnnnnnnnnnnnnnnnnnnnnnnnnnnnnnnnnnnnnnnnnnnnnnnnnnnnnnnnnnnnnnnnnnnnnnnnnnnnnnnnnnnnnnnnnnnnnnnnnnnnnnnnnnnnnnnnnnnnnnnnnnnnnnnnnnnnnnnnnnnnnnnnnnnnnnnnnnnnnnnnnnnnnnnnnnnnnnnnnnnnnnnnnnnnnnnnnnnnnnnnnnnnnnnnnnnnnnnnnnnnnnnnnnnnnnnnnnnnnnnnnnnnnnnnnnnnnnnnnnnnnnnnnnnnnnnnnnnnnnnnnnnnnnnnttgcctatcttggtggtttggaatgaggagtcgccgatctggatgtcttcaagctcgtccgccggctcgggtctccattcctctacatctcgcatatcaagttctactaaattgatcggtttccgaggaggctgttcctcggtttttgatcctctttgctctcctggccgtactcgatgtggtgatgaagggccgccctccgtttctctgatcgtgttgtaataacactgccgggactctttctgatctccgcaaatcgtaatgactttgccaaggtgtcctaccatcttcattttctgatgctttgtggacatcaggatatcccacttatgaagcgtgggtctccccaggataatgttgtatggtgacgggaattctccgacggtaaacgtcaccttttccgacttgaaaccttctctcgttcccaacgtcagctggaggtcgatcaccccctttaggccggtaccttcgccgttaaagccatacagcatcgtttggcacggcctcaggtcttcctccttcaagttaagcttcttgaaggcgctccagttgataatgtctgctgaactgccgttgtcaacaaatatccgcttaacccggaagttagcaactgtcccagttatgacgagaccgtcttcatgtccgggcacaactcccttcaagtcttcatcggtaaaatagatcaatggaggtgtgtctttcttgttgcctccgccgtcggtttgtttgaactttggccggtctcttaccgacataacttccttgagatatttcttccgctgatttgccgtatcgcctcctcctcctaatcctcctgcaatgacgttgcattcgaattcaggttctgggaattcgtcgtcctttttgctcttcttgtcgtctcgtggcttattctcctgttgggattttctcttggcttggtgcccctgggttcggattacatactggcgtaacttgccttcgcgcacgaatttttctatggcgtctcggagttcccaacattggtcggtcgtgtgtcccggtccattgtgaaagtcacaataccgagtatagtccatcccttcctttcgtatcactggaggaggccgattgacctttctcatttccgtgaaggccacttctttccaaatctgtccccggctggcgcttaatggggtatacctttcgaactttgattcatacttccctggtctaggacgattgtcgggaaatcctcgcggcggtcggcctaccgctgcattagtgggatgccgactggattgcccgacgtggaaggtatctggtcgtcggttccgtggcggcgacgatttcttattttcttttgaagccgagttggctatttccatctgctctaactccagatacttttgagaccgaatgccgaactcactcagggatttaacgggatctttgtagattgatttggcaagtcgggaagacccgttaagccccgccgacaagagataaacgtgaacgttctcttccaggccgtgaacctgcaatgccgcctctctgaatcggtctaggtaactttgcagtgtctccccgtgctgttggcgtatctttcccaacacgaactcggatttgggctgcttcttgcttgttgcgaaatttagcaagaatttctgtccaaaatcttcgaaattgcggatggtcctcggtggcagtgagtggaaccaagtctgggcggctcccgtcaaggtcgtcgcgaagattcgagatatgatcggctcgtcgattcctcgcacacacatctgcatatcgaactcatcgatgtgcatctgtgggtcttgacttccgttgtacttattcaagaaagacccatcaaagtcttccaagaacggggcgttgactatatggtcaacgaacgggctattattctggtgaccccggctatacttcctcctatacgcaccatttccttcaccgagacgacgggctatctcccccgtcggtctttcctccgcggtatgtgaaatggccatcgatgattttcctcgttcaggttggttgacggggtctctttggttggtcccggctgctcgggccgacactgatggtcccgacctccttgccgttgcatggtcggcttctgtgcggtcttcgtcacgtctatcgtcggtattttgccgacgtccctcctcacgtcttctgtcgtcgcgatcctccaactgagcgatcagctgtcggatgtcttcctggcgttgcaattcataacgcttttccagattctccattctagccaacagggattggagagcgctctggatgaaacgttgagaacttccttgctcggccggtggtgtgtcggccggcacctgcgttgttggctccacacgagatgatgctgtgtgggacaacgcgtcttctgctaccacctcctccggagtcggattcctgggtgggtcttcacgtcgggcgttctggtttctcctagcgttagccattgagagatggtgggagtcgaattttatcgttcccacagacggcgccactgttctgctcggtgagaacagaaatgtccaacaatggtgttggaggatttaatgtaggatcaaactctctctctctcaagaagcttatgaatacgaaaccacttgaggaagaagatcaccgcacaaggaacacgacacgttgagggggtgcagtgtgtgcaggtgtgaaggaaaagagagagctagaaaatgtgtaccgttcaccatgactgaagaagtatttataccagggtgcccatgaggcggttgaagctcgtgatcttatgccatgcggttaagcttgaaaccgttctccttgatatgcggagatatgggttcgtgggagataacaaacttatcccacctttcggggtggttactgtgggccactatcagtcgtttggctgctttaaagggggagataacaaactcccgtaacatactgtatcctaatactgccttggaagaaacaagatatcagcatgttttgactatttggtacagtaggatggagacaagtttgttttctgcaaattttcaatagaaaatggcatgaaaggataaaagtgaaggtgtttttttctaacacttcccgacaaaacaactttcaaagacagtaggaagactccgttctggtctctttatctatgggtcgtcttgcattgcatatataagtttctaattaaaatttgatttaactttcgattttaaatcataaactatataaaacaaagatgtttttttataaaatatatttaaaaataattgtaatctttgtttatctcaattaaattttgaaatttgacatatactattttaataaaaatgacgtgtcttgattcaagtaatttatttatctctttaatttattatttaataaaattgattattcattattaataatgagaaaatgaataatttttatttatatataatacaaatttgttttttttcaatcattttttcctttgtagtatcatacatgagtatacaaaattaatgataacaatgatataagcatacaaaattaatgatatataacaatgatataagtaggttagatggaccaactcataccccaaagttaaacaaaatgattgtcgtcaaacatttgaaagaatggaaatccttcacactttaaacaaaattttattaatcactctaatttagattaacatgatctatagaaatctactcaacctcaacaaaagagactaaactaacataaagaaaattgaagagaaaaaagagaactgtataaatccttaaagagacatggcttactacattcagactcaaactcacactaattaacttgagaattcagtccttaattacagctaacattctcatttatgatattaagggaccaccatcaaagaattgcatttagcatgaccacaaggttctcattcattatccttgagttggtgtagaatattttgtcattccttttaggaagtttcttggcatcttgatcaagggagactcgacaatagctagacatagtttttgtcatttgttttagaaaacttcttgtatattcaccttatagaagacaatctaaatagttgtcaaacataataattatcatttttataggaaattgtaagtgtcttaactcttaatgaaagaaacattcaaannnnnnnnnnnnnnnnnnnnnnnnnnnnnnnnnnnnnnnnnnnnnnnnnnnnnnnnnnnnnnnnnnnnnnnnnnnnnnnnnnnnnnnnnnnnnnnnnnnnnnnnnnnnnnnnnnnnnnnnnnnnnnnnnnnnnnnnnnnnnnnnnnnnnnnnnnnnnnnnnnnnnnnnnnnnnnnnnnnnnnnnnnnnnnnnnnnnnnnnnnnnnnnnnnnnnnnnnnnnnnnnnnnnnnnnnnnnnnnnnnnnnnnnnnnnnnnnnnnnnnnnnnnnnnnnnnnnnnnnnnnnnnnnnnnnnnnnnnnnnnnnnnnnnnnnnnnnnnnnnnnnnnnnnnnnnnnnnnnnnnnnnnnnnnnnnnnnnnnnnnnnnnnnnnnnnnnnnnnnnnnnnnnnnnnnnnnnnnnnnnnnnnnnnnnnnnnnnnnnnnnnnnnnnnnnnnnnnnnnnnnnnnnnnnnnnnnnnnnnnnntaaatataattaatatcgttttatttttattgattaataataactatcttttaaatacttaccttaattataatatatttgtttcagccaaattagtaaaataatattttgcaactaaattttggcaatagctatataaatttaatttaatttgtattttatgtattagttttattttgatttagcaactaatttttaaaaaagtttaaatatatttttagtctttataatttaaagcttttatgcttttagtttttgtaaaattatttgtatttccaatcctttcaatttatatttgttttattttttgtgttcgtaacattttagataattttttttacagtttaaaaaactattttatgtattttaaagattaaaaataaaaaaatttaatttataaatattaaaattaaaataatagttttgtaaggacgaaaaggaaaaacaataaattacaatgacaaaaaatataattaaacaaaaaaactaaattaatacatgcataatttagaagaaataaaattaaaaaaattataaatgtttagactttttaattgctggcaatataaataaattatctaagaaacaaaattattttgatatgaaacacgggcgaaggaagaaaaagcaaagaaagagttgaattgaaatgaaagcctttgaggcagcgtaggctataaatagaagtttgtgaattgaaatggttgtatcaaaatcctctataattatgttgttgagttgaaacgatgaatatgaataacaatgtttggtggcttcgactcgcatactttctcttccttcttcttctttttcttccttcttcttcctctttctgcaaccaccatgacagctctgccttgctacttttcaaaaactcgcttgctctcaacactacacatgattatttctttttctgcaacccccttgacacctctgccttgccacaactcggaaactcactcaacacttcaaatgattttccttccaaaacagaatcttggaaaaacggcacagattgttgtgagtgggatggggtcacgtgcgacatcatctcaggccacgtgattggtcttgaccttagctgcagtaatattcaaggtcaactccatcccaacagcaccatcttcagcctaagacaccttcaacgactcaacctagcctttaatcagttttctggctcttcaatatattctgaatttggtgatctggtgaatctcatgcatctaaatttgtcatactctggattcactgctcacattccctccacaatctctcacttgtccaaattactgtcacttgatctcggtagcctctactttataattcttgatcccaactacccgagaatgagacttgatccatacacttggagcaaactcattcaaaacgcaactaatttaagagagcttaatttagatggcgtggacatgtcttgtatcggagagagctctttgtcattgctaaccaatctctcttcctctttcatctcccttagtctctctgacaccaaattgcaagggaatctgtccagtgacatcctctgtttacccaatcttcaaaaactatctttgttttataataaagacctcggaggtgaacttccaaaatccaactggagtactccactaaggtacttggatctctctgagactgctttctctggaaacattcccgattccattggccatttgaagtctcttgacacactacagctgtggggttgcaattttgatggactgcttccctcatcattgtttattctaactcaactcgtctatttagatttaagcgataataaattagagggaccaattccatccgaaatcaataaactttcaaaattgcagtatctatttttgtctgataacaagttaaatggaacaattccacgttggtgttattctttgccttccttgttagagttggatcttaacgacaaccacctcacggggtcaattggtgaattctcatcttattctttggaagacttgtcactctctaataacaaactgcaaggtaatttgagtggtcatctggactttcatcatttttcaaagttaaaaaaactatctagcctcgatctttctcacaatagttttctctctattaactttgatagtaccgctgactacatcttacccaaccttaaattcttatatttatcttcctgtaatattaatactttccctaaattcttagcaccacttcaaaatctggcccaactagatctttctcataacaacattcgtggaagcattccccagtggtttcatgagaagctcttgcactcctggaataacattagtcatattgacctcagtttcaacaagttgcaaggagatcttccaattccacccaatggcattcaatactttttagtctcaaataatgagctgaccgggaacattccttcagcaatgtgcaatgcaagctccctcaatatactcaacttggctcataacaacttgacaggccccattccacaatgtctgggaacatttccttttctttgggcattggatttgcaaaagaacaacctttacggcaacatacctgggaacttttctaacgtaaatgcattggagactataaagttgaatggcaaccaattggatggaccattaccacggtctttggcccactacacaaagctggaagttttggacctggcagacaataacatagaggatacatttccccattggctagaaagcctccagcagttacaggtactcagtttgcgatcaaataagtttcatggtgtcatcacttgtttcggtgccaagcatccatttcccaggctgagaatttttgatgtctcaaataacaattttagtgggcccttgccagcatcatacatcaagaactttcaaggaatggtgagtgtgaatgacacccaaactggtttgaaatatatgcgtaacgactattcctataatgattcagtagtggttgtaatgaaaggtcgatacatggagttcgagaggatattaactattttcacaaccatggatttatcaaaaaatatgtttgaaggagaaattccgaaaatcattggagaattgcattatctcaaagggcttaacgtttcgcacaatgcaatcactggtaccataccacaatcctttggtaatttaagaaatttggaatggttggacctctcgtggaaccagttgaaaggagagattcctatggctttgatcaatttgaattttctggctgtgttgaacctttcacaaaaccagtttgagggtatgatacctacaggtggacagtttaacacatttggaaatgattcctatgctggaaatccaatgctatgtggattccctttgtcaaaatcctgcaataaggatgaagattggccaccacgttcgacatttcaccatgaagaatcaggattttgctggaaagctgtagcagtgggatatgcatgtggattgctatttggaatgcttttggaatataatgttttcatgactgggaaaccacaatggctcgcgagacttgttgaaggtatgcttaattaatgaagagtgaaaaggacaaatcataggggaaggaaatagtttacccttattttaataaggttcttttgtgtgtgtcaatatgttttctgtaattttaacttctgtcctttgtgtaacaaatctcatctctcttgagtgatgtatttcaagttctttacaaataagaaaaaaatgtgatgatcgtagataccaaaatgagtggtcttcacatgtcatgttattggctcaaaaactgattctaatctccaaagataaaaacttattagccaatagccaccacttgtatgtcaagcatgcgatggtacgagctaagattaaaactggacttttaatttaaaaattggtttcccctacccctattacatactttcttcaaacaactatccctaaccaactcagtccaattattgattaaattttgctgcatgatgatcgtagatgcgcccatggccatgccaatgtgtccttttgggagtttccttgagtgaaaataaattaaacaaagtccccataacaatagccttctaatgctatgaaagctggcacctttgggaggctttcattaatttgaaagttaaaacgatattggtaaatatttggactaataaaatgaaacaatattgatcatactagtattcacacagcaaatatgtggcaattgttcttgaaatcaactttatagcctgacacaattcggatccatgtatttctgggattggtttgtatagggtggtttttttttatcgatatatattatttgttagtattgttaatttttgcgtagaaaagttatagcttgtttacttgttggatgaattgtttttatatgtatacataaattgtgtattgctaggaaaaaaaatagtattagaatcctattatttagttttgcatttcaaaaatttataagatccaaaaaatgaaagcaaaaaagggtgaagttttgacggtaatccaaccaaatttgcacttacatttttaatgtatatgagaatattaactacttaactaccttcacaactattgacttatgtttgtcacttcttctcaggatgaagttttaacagtaactcatgaattactgttaaaaccaaatgtgtacacaagtttagggtgcttgacttaaaaccttcttcaagtgtacctgttatagaaacatatatgaagttgacatactgctcttcccataatattagctaaaagattttgattctcagctctaaagttaaaaatttagaagcaggagcttataacaagcacggtaggtcctgagattttatgacaaaatagatatataatatcataacaaatatacattttatttcactaaataaataacataattttaataaatcttaaaaaatatcatattttttatttaagatactcttatattattatcaattatgcaatttctatctctaaaaaattttaaatacacataaatatttatatataaggtatacatgacaaataagggacaagatggagagacatgtttaactctctttatccgcgtccctaaaaaggtaagaatgatttaaaagaaatcatattatgttttttaatccaattcattttaaattttatcgaggttggataaactcacatggatatatatttttttaaaatattaattaaatttatgatttaatttatttttttatatttgatccttcaaaaagaaaatgaatatatatatatatacatatatattaatnnnnnnnnnnnnnnnnnnnnnnnnnnnnnnnnnnnnnnnnnnnnnnnnnnnnnnnnnnnnnnnnnnnnnnnnnnnnnnnnnnnnnnnnnnnnnnnnnnnnnnnnnnnnnnnnnnnnnnnnnnnnnnnnnnnnnnnnnnnnnnnnnnnnnnnnnnnnnnnnnnnnnnnnnnnnnnnnnnnnnnnnnnnnnnnnnnnnnnnnnnnnnnnnnnnnnnnnnnnnnnnnnnnnnnnnnnnnnnnnnnnnnnnnnnnnnnnnnnnnnnnnnnnnnnnnnnnnnnnnnnnnnnnnnnnnnnnnaataatcttatatattaatttgatatatactatattatatattattttataataatcttctcataaatgaatatatatatatatatacatatatattaatttgatatatactatattatatattattttataataataattgtagtaatataattattaaaataattaatgataaaaaagagtataatagtatatttgacattcttttacttgttaattattcaccaaacaaaacaataagttgtcaagtaacttaaacaatcattttgctttgttctctttgtattataaattaatagtttcaaacggattaataaatgaacatgtacaatagaaactggtgcactttaaaagtatttaatgtcaacgacgtagtggcgaatgcatgagaaaatgttgtacatattaaacttttgtaatttgttgttaataaaatcatttttaacccacaacttaaattaacataaaatacagattcagttaaacgtgaaatataaggaaaattagaaacaatacaatataatattaaaattaatgttgctatggctaagtataaaaattttcacaactttaattagtcatcacggcaggcctgaaattacttatataaatatattcacagccaatccagatccagcgtgatgcataatttcatcccgtgcaattttcatgtaagacggcacaataatgttaaaaaatttaacgtgagtgataagaaatgtttgtattcgtgacaaattttataaaattgtcactctccacaacgggaacaataacggtgatgcttataacttctgcaacaaagttcataaagtgagtaaagtaaaattataacatataggaatcgtactaacttctgaccttaaaagttcaaaatgtgagtgagctaaacttgggatatgtttagcctagcttatttttagcttaacttctacagccaaacactaaaaccataaatatttgtaacagatggtgggagtcacataattgcccccggtctcaagaagctctaggaaataatttgatgcacgcaacttcaactatttttttttctctgtttttttatattcgttattagcataagcttaattataaattcacaaatatttgcattttatttaaaaaaatcataaaaatgtatgagaagtttaagttgaaatatataatttctaagctaggcccaacaaggatggaagtaaaacctgcagaaaccacctggattgctgatctcactaattgtggcctatacagagtactgagagtagcctttcgctattttccctgtttttacaaaagcccatagacgtagcagaatatgccaaattcatcccacgaaagacgagaactcatcaataccagtttcctaattataaatctttactggcttctcgaaagtgtgccgattctgaaacaaaacgcacgcaatttgaaatggtgtaataaacaaagttctctcaacctcaaaactaaaacccagtattaccagaatagtggacaaccacaaaacaattaaaaacaccaaaatgtacttaataaaaattgctcgtgcaggcaaagttacaaacctggttaacagcatatgatcttttaggagcattgtcagtatgctccaagccaagatactgctcccaagcaccataaacatctctcctctatcacaagatacaatgcaagcataaattcagacatgaaaatgatgctaaatatcaattgaattatcacaaaaaaaaaaaaaaannnnnnnnnnnnnnnnnnnnnnnnnnnnnnnnnnnnnnnnnnnnnnnnnnnnnnnnnnnnnnnnnnnnnnnnnnnnnnnnnnnnnnnnnnnnnnnnnnnnnnnnnnnnnnnnnnnnnnnnnnnnnnnnnnnnnnnnnnnnnnnnnnnnnnnnnnnnnnnnnnnnnnnnnnnnnnnnnnnnnnnnnnnnnnnnnnnnnnnnnnnnnnnnnnnnnnnnnnnnnnnnnnnnnnnnnnnnnnnnnnnnnnnnnnnnnnnnnnnnnnnnnnnnnnnnnnnnnnnnnnnnnnnnnnnnnnnnnnnnnnnnnnnnnnnnataaattcaagatatggagaaagaagctaaggtgtacagcttatttttaaaaaatactccagttaggttttttttaagtagttacttttccctccttttcttttatgaaaaatacatttcttaatttttaagagtttttttctaaatgtgtttgacttaacttctctttttaagaagaaaaattaccatctaagtttgttgtcaatttgcataaaaagttaccatctaagttttccttttactaagaagtgtggtatacttattgctgttaatttaattttccagtcagtatgcaattcttcatagttaatgcaaggaaatacacaatctcgcaatatgagttcatatgaaagatgagcaaattaaattattatattatgaatcagactatctgaataaattgttttaactttttcggtaggtggagcatcaagcttcagtttgccccctgcgtctaattacatgccggttttgtggtgatataagtttcaccttaacctaatggagatttagccattttttgcagtttctcgaaactctcacaaactttgtgatcatatatacagtttttcttctaacaacatacaaactttttgcaaattgaaaattatacaaatttctgtggttcaatagatttacaagcagatagtagtatctgttaacctataaaaagacagttaatcagtaaaatagttaacctataaaaagtgttattacataaattataataaccgatgttataaaaacaagaacttagaattaatgcaactttctttaaaaaaaacatagaatgcaatattaataccttttcaataacttaaaaccattaataattaaagaacaaatagctttatataatatataaaaataccaaaatatcctaatttattaatactctatttttatatgtaaaaaaaataaaaataactaagatccaccactgcttgggaaatttaagaaatttggaattgttggacctctcaaggaaccagttgacgagtgagattcctgtgactttgacaaatttgaattttctcgttatcttaaacctttcacaaatgtgtggacagtttaataatagatttggaaatgattcctatgcttgaaatccataatccaatggtatgtggattccctttgtcaaaatcctgcaatgaggaggaagaattactaccacgttcaacacttgatcatgaagaatcaggatttggatggaaatccattgtagtgggatgtaatgtattcttcactggaaaaacccaatggcttgcaagacttgttgaagatgtgctatatgtcagacagtcagagtgaaaagaacaaacaacagaaacaatgcaaactgtcggggagtgaattagtgtgtgtgtgttaatcagtatgtattttttattttgtaattttgtaattttaacttctctgtttgtggaatgaaatctcctcccaatatcattagatgatgtatttcaaattgttgtgcaaataagatatttagagatcaatcgcttttgtttataaattaagttcaatttatttgccacgcacaaattgtccaagacttgacctgcaaagacattgaggaaaattcaggcgttcaaccttcaatcatcacaagatcagcattttattagggacaaacttgtacagctttcttgaaaaacatacattttttacacaattgtgttcagatttttcaaacaagctgaatttgtgttttattgtttactagaagccgtactaattaaggtagcatcgagatggatgaaacaggtcttgagcaatgagcagcatgctagtctcttcttacagagaatgtgcatacaaacataggggctttagttgaaaccttcttgtaccagaaaaaacataccagaaaaattaattttatttttattatattttgtttaacattaaaattattattttcacttttatttagaaataatataaaataatattacaactttttttataacataatagtaattatacataatgatgtttaacattatattttaacaatattaatacatcatttttaatatataaatgaaagtaaaacatatatcttaattatgaaacaaatgaaaattaataaattatttaatatttattattatttatcaataaaaattaatataattgatttgatttagtttttttataataagatttaaatataattaaattataaaaaatataatttttttatatttttattttttgtaatttttatttaaatgattttgatttttttattgatttgacagtttataaatagtttgatttaattttgaatattcctattataaaatggcatcaattaattgaattaaatgataaatgtttggtttttctaacactttcagagaaaaaactttcaaattaagagaatgggaagactccgttttggtctgggtcgtgttgcatgtgttttaattaattttcactttgagaagacaagacatttacgccaacaccaacaacagaataatataatttaaaacaaatgataaaaataaaataatatttatcatcatctgatttgagtggtcatctagactttttcttcttttagaaaagagataatatatatatatatatatatatatatatatatatatatatatatatatgagagatgacataatattatagaaagaaacatataataatttcttgtcgcaacatccccaattttgcttgacagctgattccggattactcactcaactatcctttttagatttattatttaataaattagttggcctaattccaacaaaaatcaataaacttccacaaatgtgagccctactttagaatttagtgaaattccacgttgatggtattctttgccttccttgttacgattggatcttagtgacaaccacttgacggggtcaattcagtaagtttctcatcttattctttgaaatatttctcatcacctgacttgagtggtcatctggacttttctgtttctttttctaagaaagagataatatatgtaatatataattatgataagtaacatgatagaaagaaaaatagagataaataatgagtgttaattttgtgtttagcaaaataaaatattcaaaaatgattattaatattctttcttttttgatgtccgttcaatataattgtgatacaaaaacagtaagcaaaacacaataaaataaattgacccacgaaatgggaataagaaagcgagcaacccctggtcacgtacgcttataattatggttcatacatactactacaacatagtatttgactatttgtcattcgctttacaagtttctattaaagaattatcaaacatgttacttgtcattaaaaaatacgaaccagacaaataaaaaaataaatgataaaagtagtaacataaaaaattgaggaattaacttgatgagagacttttttttattacggatgataaactaaacttttaaaagattaatttaattttaaaattattggagaactaagatagtaactgttacgggataagtttgttatctccccctttaaagcagtcaaacgactgatagtggcccacagtaaccaccccgaaaggtgggataagtttgttatctcccacgaacccatatctccgcatatcaaggagaacggtttcaagcttaaccgcatggcataagatcgcgagcttcaaccgcctcatgggcaccctggtataaatacttcttcagtcatggtgaacggtacacattttctagctctctcttttccttcacacctgcacacactgcacccactcaacgtgtcgtgttccttgtgcggtgatcttcttcctcaagtggcttcgtattcataagcttcttgagagagagagagagtttgatcctacattaaatcctccaacaccattgttggacatttctgttctcaccgagcagaacagtggcgccgtctgtgggaacgataaaattcgactcccaccatctctcaatggctaacgctaggagaaaccagaatgcccgacgtgaagacccacccaggaatccgactccggaggaggtggtagcagaagacgcgttgtcccacacagcatcatctcgtgcggagccaacaacgcaggtgccggccgacacaccaccggccgagcaaggaagttctcaacgtttcatccagagcgctctccaatccctgttggctagaatggagaatctggaaaagcgttatgaattgcaacgccaggaagacatccgacagctgatcgctcagttggaggatcgcgacgacagaagacgtgaggagggacgtcggcaaaataccgacgatagacgtgacgaagaccgcacagaagccgaccatgcaacggcaaggaggtcgggaccatcagtgtcggcccgagcagccgggaccaaccaaagagaccccgtcaaccaacctgaacgaggaaaatcatcgatggtcatttcacataccgcggaggaaagaccgacgggggagatagcccgtcgtctcggtgaaggaaatggtgcgtataggaggaagtatagccggggtcaccagaataatagcccgttcgttgaccatatagtcaacgccccgttcttggaagactttgatgggtctttcttgaataagtacaacggaagtcaagacccacagatgcacatcgatgagttcgatatgcagatgtgtgtgcgaggaatcgacgagccgatcatatctcgaatcttcgcgacgaccttgacgggagccgcccagacttggttccactcactgccaccgaggaccatccgcaatttcgaagattttggacagaaattcttgctaaatttcgcaacaagcaagaagcagcccaaatccgagttcgcgttgggaaagatacgccaacagcacggggagacactgcaaagttacctagaccgattcagagaggcggcattgcaggttcacggcctggaagagaacgttcacgtttatctcttgtcggcggggctcaacgggtcttcccgacttgccaaatcaatctacaaagatcccgttaaatccctgagtgagttcggcattcggtctcaaaagtatctggagttagagcagatggaaatagccaactcggcttcaaaagaaaataagaaatcgtcgccgccacggaaccgacgaccagataccttccacgtcgggcaatccagtcggcatcccactaatgcagcggtaggccgaccgccgcgaggatttcccgacaatcgtcctagaccagggaagtatgaatcaaagttcgaaaggtataccccattaagcgccagccggggacagatttggaaagaagtggccttcacggaaatgagaaaggtcaatcggcctcctccagtgatacgaaaggaagggatggactatactcggtattgtgactttcacaatggaccgggacacacgaccgaccaatgttgggaactccgagacgccatagaaaaattcgtgcgcgaaggcaagttacgccagtatgtaatccgaacccaggggcaccaagccaagagaaaagcccaacaggagaataagccgcgagacgacaagaagagcaaaaaggacgacgaattcccagaacctgaattcgaatgcaacgtcattgcaggaggattaggaggaggaggcgatacggcaaatcagcggaagaaatatctcaaggaagttatgtcggtaagagaccggccaaagttcaaacaaaccgacggcggaggcaacaagaaagacacacctccattgatctattttaccgatgaagacttgaagggagttgtgcccggacatgaagacggtctcgtcataactgggacagttgctaacttccgggttaagcggatatttgttgacaacggcagttcagcagacattatcaactggagcgccttcaagaagcttaacttgaaggaggaagacctgaggccgtgccaaacgatgctgtatggctttaacggcgaaggtaccggcctaaagggggtgatcgacctccagctgacgttgggaacgagagaaggtttcaagtcggaaaaggtgacgtttaccgtcggagaattcccgtcaccatacaacattatcctggggagacccacgcttcataagtgggatatcctgatgtccacaaagcatcagaaaatgaagatggtaggacaccttggcaaagtcattacgatttgcggagatcagaaagagtcccggcagtgttattacaacacgatcagagaaacggagggcggcccttcatcaccacatcgagtacggccaggagagcaaagaggatcaaaaaccgaggaacagcctcctcggaaaccgatcaatttagtagaacttgatatgcgagatgtagaggaatggagacccgagccggcggacgagcttgaagacatccagatcggcgactcctcattccaaaccaccaagataggcaagcaggccgacccagaagataaaggcaggctcatccaatgtctgaagaaaaatcaggatgtctttgcttggaaagcatccgagataccgggaatcaagcccaccttttgttgccacaggctggcaatgtatcccggctctaagccgatagagcagaaaaacaggaagctcggtccagacagaaagcaggcgttgaccaagcacatcgaagaattgctcgaggcgggatttatcagagaaatccaatataccacctggctttccaacgtagtgatggtgaagaagcccaacggaaaatggcgggtctgcgtcgactacaccgacttgaataaagtctgtcccaaagactcataccccatgccgagcattgatcaactcgtagataactccgccggtttccagctgctatcattcatggacgcttactcggggtataatcaaatacccatgcaccccgacgacaaagagaagacggcatttcgaggtattagtgctaactactgctatgaagttatgccttttggtctaaaaaatgcaggggcgacttaccagagaatgatgaataaagtcttctcggatcaaatcgggcgtaacattgaggtatatatcgacgacatgatcacgaagacttccataaccggggaccacatccaggacctagaggaaactttccaaaagctgcggcagcataatatacggctgaacccgttgaaatgtgcatttggagtaaaggccgggaagttcctaggttttatgttgacccaccggggaattgaagcgaacccggacaagtgcaaggctgtcctagacatgcaatttccgaccaacaagaaagaagtccagcagttgacgggaaggatggcagccctgacccgattcctaccacgatctgcggagaaggctcttccattcttcaagcttttaaagaaggaagccaagatcggatggaattcgacatgcgaagaggcattccaacagataaaggcatgcttggcctcaccccccgtgttgtcaaaaccagaaccgggggaaacgctcatcctgtatctctcggtcggcgaagaagctatcagtgccgtcttggtcagggaggtggataaaactcaacatccggtttactttgtaagtcgggccctcaagaactcggaattaagataccagaaactcgagaaagtggccttcgccttagttaccacggcaaagaggcttcgcccatacttccagggccataccgtcatcgtccgaacaaatcaatccatccgacaagtgctgcacaaaccggatctggctggacggatgatgaactgggccatccagttgtccgaattcgacatccaatacgaagcccgccaggctatcaaatcgcaagccttggccgactttattacggaattgacaccaacgtcgcccactcagcagaaaaacaaagtctggaaagtatacgtagacggctcatccaacacaaaaggaagcggtgccggggtcattgtcgaaaaccccgacggggtatccctcgaacagtcccttcagctcaattttccgacctctaacaaccaagcggaatacgaagccttgattgcaggtttgaagcaggttaaggagcaaggagcaacaagggtcaacgtcttcaccgactcgcagctggtttccgcgcagatcgaaggcagatatcagactaaaggtcccttgctagccaaatatttggcaaaagtgaaggaaattatggcggaatttgacgaagtgatagttgcccacatcccgagggaggaaaatacccgagccgacatcctctcaaagttggctagcacaaaaggggcgggaaactatagatcagttatccaacaggaactcgcccgaccagcatgcgtcatgatcatatttatcgcgaacgactggagaagacccatcgtcaactatttggagcaaggaatcaccccggacgaggagctagaggcaaaaaagttaatccgagaagcggcgaggtatgtaatcctcgacgatgaattataccgccgaggtctacatagcccactattactatgtctgaactcggatcaagccgagtatgtgctttcggaaatacacgaagggattaacggacaacacatgggcgctaaggctttggcactaaaagctctccgtgcaggctatttctggccgacgatgaaagccgacgcaacggaacacgttaaaaggtgcgacgcttgccaaaaacatgcaaagatagtatggacccctccgtccgagcttagtttgatcactgcaccatggccgttttacaaatggggtatggatttgctgggaccgttcaaagctactgagggtcaaatgcgatggctaatagtggtcgttgactacttcacgaagtggatcgaagccgagccattgtccgccatcacctcagctcgggttcaaaagttcatggagcgggctataatagcaaggttcgggattccggcggaaatcattaccgacaatggaacgcagtttaccgacagaacattccaagcaacgatgaccggcctccatatcaaacatcattttgcttcagtagaacatccccagtccaacggccaagcagaagcggccaataaagtcatccttgatggattgaagaaaagaatgcatgaagccggcccgaattgggtcgagcaactgtactacgtactttgggcctacagaacgacgacccaaacagctactggcgaaaccccattcaggatgacctatggctgtgaagccatgattcctgtagaaatcggccaatcatcatggagaaggcggcatatatcacaagagagtgacaacaatgctgccttaaccgccgagcttgacttgatagaagaagtccgcgctgccgcccaccgtcaggacctccatcaaaaaagcaagctggcgcaaagatttaataggcaagtgaagccgaggtcctttgaaaaggacgacctcgtgttacgccgagcagatatcgggaacaaaaatgctcgagacgggaagctagcggcaaattgggaaggaccgtaccgagtaacccaaaatcttggccgaggagcctacttgttggaaacattgaacggcaagcaagtccaacgaacttggaacgcagacaagctaaagaagtactatagttgacaagaagcggacaaggtccatgtgttttcctttagttggcttctagtcggtcatcgggatcatgaaactccatcatgtgtttccctttagccgaccttaagtccgtcatcggaatcatggacaccatgtgtttccctttagttggccctcgggcccgtcattgggatcatggcattagtgactttcattagattttgtgaaccgggaacatacacccgcgcaaatctattttgaggtcaagttgaaatttctttcatgtttgtatcaatcaattgtgaaccgggaacatacacccgcgcaaagatgtaattgatatcatgaactattaataaaatccttaatgcaaggaacattcttcgtgcacgaattatgagcgcttagtcgttgttttatattaactcggtcctgatcaggccggcgtaactattcaatccagggtgaatcatcggatttttccgaaagaattacatctaaaggataaagttatgaatatattaatagttgctaagacgggaacatgatccctattctatttttaataccgattgaataattcgggttaaataaaatatggctaaaccgacgataataaccgactagcaagttggccgttggagccaatatacggtagaaatacacagcaagttataaaagccgacgaaatgtactttaaaaagtgcaaaaatacttgttcaaatacaggaaaaggaattgttcaaaatatacaaaatgaaaccggcatcccggcccttcagttcccgccgtcaactggagtcccggcctcctcgggtgcatccgtactcgcctcttcatcctcgctgtcggaagcggtgaacagctgaccgttcccgacataagatttgaagtgcatacccgaggtgttcaactcaatgccggggttcaaaaagcgaatctgatccaaagcattattaaaagaagcttcggtagacttcgataattgagccctaacgaacaagagttcactcagcatctcggaatgctccagggacttcttctcattaagggcaagcagctgatcgcaacgatcgcgagcctcccgagctctccccccgttagccacgagatcctgctccagctttgcaacggcggcacgagcagagtcggtctccacccgagaagcctcaagagctgctcgggactcctcaagatcggcggtcagcttggccaccgccccctgcgcctctgcggcctccgcccgagatgtgtccacctctttgagagcatgatccagctcttgttgaagccgttgattctcgaccttggaggcctcgaattcagcagacatcatggcggactttttcttcagcgcggccaagcttcttagcaaggtggcggtcttcatacatgacacctccaacaaaccgagttcttctaactcgggagttgaaagaggaaccatgtcagaatatttcctaggggcccgcaccgccgccaagaggtccgcggtcacaccatgggtccatagagaccggggagacagctgctgaggatcctcggtcggctcgcactccgaggaaggaacagcatcctccaaaaccggagcatccgagggagcgtcgtccgacggcccatccaaaatgacgacggaggtttcggccaccgaagcagaagggagaggagatgcaggggcctcggcggcaacctcggtcgaaaccggggcgacttcagagccaccgggtgtggccttactcttcccctcggccaaccttcgcctcttccgagattttaaggcttctaggtgggggggtcgaggaggacggccggggttcatttcgacagctgcataaacatcaaagtattagacatcaagaaaaaagccaatcattcaagatttattttcaaaaggcattaagactgaccacaccgaacatagtaagatataggggtcaagtttcccgactctttgtaggaaattattcgggcagcagacgtggcgtcagaatccgacaactgagcctcgtcggttcggtaagaggctgaaggaaggtcatgatggacggaagaccaatacaggggaaacttccaggattccgaggaagacccaggagggagagcaaaaaagggacattgaccaggttcggccacaactttaaaaaatttatctttgaagcccttaaaggactcagcgtatagagaaaaaagccgacgatcagaacgatgatcagtacgaccccggaaagaagtccaaccttttcggtcggcaggttccttaccggatcggtttgtttgaaccataaagaaataaaagaacaaaggacgggtacatacaagttccagtttttgacagagaatctcgaaggcttgcataaaagcccagccgttcggatgaatctgggaaggagcaacttgcagatgactcaatacctgcatctggaagtcggtaaagggaaaataaactcccaaccgagtgacgacatctttataaaacagaaagaagtcggggtcattcccctctcgggaagaacaaattggttcacccgggcggggaagacagacgtggaaaccttcttgaacccccaaaggaattgaagcaaggtcctcggaatccatagtagaggtgtgttgtagcacctcatgggttacccaaggaaacctacctgttagcgcgggagaaggaacttgaggccgagacccagttgcggattcatcaacacttctggcccgagatgagtccataatcacctacgataacaaaaaagaattattagtgaagtacctgaaagggtcgtcaaaggacgaagagaagaagaggtcggaattggccggttagggtcttcagcagaaatcggttgttcaacagaggtcggcatcccggtatcacggctcggttgggtcggaggaatatttgtttcttttggaacagacttacgaacccaaacagggttatgtcggcatcggtctaacactccctcggcttgcctatcgtggtctatgctggcgagatatataaactcctctatacaacgtggacagtgttcataccgaatcactgaatccgtttcgggtatcgggtaggcttcggattcacccagagcagcagtatctggaggaggggaaaccctaggagaggccttagattgcaaagcaaggagcgcgggtctttgtcgggatgatgatcctaaactagaaggccctaacctagaaggccctaatctggaagggttaaggggtctaggaagggaaaccctggaatttcctggggcagagggagccctaagcagagactttcttttttcctcctcagaaaggggcaatccaaaaagccaaaaagcagtacgaggagaaaccgttttccggatttcctcttcttgctcaggggtatacttcatgcttaaggccaagaaaaaggaagaaaagaggatgaaaggcagagaaaggaaatgcaaagattaagaaatgctaatgatgaaatacgaaacagtaaagtggcagattaaagagacgcgcggaatacctggaaaggaggaagaaagaagggttgatgatcagacacgagcaactcagtgaagcaatgggaaaggcaacagcgatgaaggagacgaaagccaggaagaagaaacgaagaagcacagtaaggagaaaatgcaaaagtataagagacagagaggaatgagaattgaagtcaggtttaatacgatgaaaacagaaaaggcgcattaaatgaaaaagtaaccgccagaatttgaaatcataagtgataactgctgggtataggggcaagattgtcttttagccccaaaagtcatgattgaaaatcagcagttactaagacacgtggcgataaggaagttggagacgttccattcccctaggtcagtagcggcagaggctgcattgaaaagacaaggagtagctcggcgacgatattgaagtgattgatgaattgacagaagatatgatatcccgacaaggggcatcgatactatacgacaatattgatcatggttatgtcggctcggccttgatcgtgtcggctcggatagtgtgtgcctcggctaagtaaagataaaacggctcggacaggggtcacctcggaacgacctcgatcgcctcaatacaaatagagatgacctcggctcggatctcaacttcctcggctcgggtggtgagcatgtcggttcggatgatggtcacgtcggttcggatgtcgaactcggccctgcgtgggtagtacctaaaaagcatagtcggcagcattattgatacatcccggccatccagaatgctagaagaccgggctgaggggcatctgttacgggataagtttgttatctccccctttaaagcagtcaaacgactgatagtggcccacagtaaccaccccgaaaggtgggataagtttgttatctcccacgaacccatatctccgcatatcaaggagaacggtttcaagcttaaccgcatggcataagatcgcgagcttcaaccgcctcatgggcaccctggtataaatacttcttcagtcatggtgaacggtacacattttctagctctctcttttccttcacacctgcacacactgcacccactcaacgtgtcgtgttccttgtgcggtgatcttcttcctcaagtggcttcgtattcataagcttcttgagagagagagagagtttgatcctacattaaatcctccaacaccattgttggacatttctgttctcaccgagcagaacagtaacgaagaaatcttaagagataatttgttaactatttttggaaaaagaaaaagaaaactagaggttagagttcaaggaattaattagtttaatatggttatgtattatataggtttatcactatgtatttatttgccgtaagttgtctgagctgtatcctgcaaagggattgaggaaaatttacgcgttcaacattcaatccgcacaaaatcatcattttattaggaacaaactcatacagttttcttgaagaacttacaatttcgcaattgaaagtacaagagaatcagtgtattttagattttccaagcaagctggatttgtgttgtattgtttactagaagccatactaattaaggtagtggatataaaatgaagcaggaattcaacatgctactctttcttacagagaattgacatatatacaatcataggggtttgagatgaaaccttcttttaccagaaaaaagatatcagcatgttttcagtatttggtacagtagatggagacaagtttgttttctgcaaattttcaataggaaatggcatgaaaggataaaagtgaaggtatttttttctaacacttcacgacaaaacaactttcaaagacagtaggaagactccgttctggtctctttatctatgggtcgtcttgcattgcatatataagtttctaattaaaatttgatttaactttcgattttaaatcataaactatataaaataaagatgttttttataaaatatatttaaaaataactgtaatctttgttcatctcaattaaattttgaaatttgacatatactatttcaataaaaatgacgtgtcttgattcaagtaatttatttatctctttaatttattatttaataaaattgattatttattattaataatgggaaaatttataatttttatttatatataatacaaatatgtttttttttgcaaccattttttcctctttagtatcatacataagtatacaaaattaataataacaatgatataagtagattagattggccaactcgatcataccccaaagttaaacaaaatgattgtcctcaaacatttgaaagataaacaaaatgattgtcctcaaacatttgaaagagtggaaatacttcacactttaaacaaaattttattaatcactctaatttagattaacatgatctataaaaatctactcaacctcaacaaaagagactaagctaacataaagaaaattgaagagaaaaaagagaactccataaatccttaaagagacatgacttactacattcagactcaaactcacactaattaacttgagaattcagtccttaattacagctaacattctcatttatgatattaagggaccaccatcaaagaattgcatttagcatgaccccaaggttctcattcattatccttgagttggtgtagaatattttgtcattccttttaagaagttttttggcatcttgatgaagggaagaatcgacaatgtcgtttgttttagaaaaattcttgtattcaccttatagaagacaatctaaatagttgtcaaacatcatgattatcttttttataggaaattgtaagtgtcttaactcttaatgaaagaaacattcaaaacactgttaaacataatacttgtcatttcttttaggaaatttttactcgttttaacaggttaagacttaaatttgaaataggaaagtgacaaggtaaaaaagagaaaagtagtaacaaaaaannnnnnnnnnnnnnnnnnnnnnnnnnnnnnnnnnnnnnnnnnnnnnnnnnnnnnnnnnnnnnnnnnnnnnnnnnnnnnnnnnnnnnnnnnnnnnnnnnnnnnnnnnnnnnnnnnnnnnnnnnnnnnnnnnnnnnnnnnnnnnnnnnnnnnnnnnnnnnnnnnnnnnnnnnnnnnnnnnnnnnnnnnnnnnnnnnnnnnnnnnnnnnnnnnnnnnnnnnnnnnnnnnnnnnnnnnnnnnnnnnnnnnnnnnnnnnnnnnnnnnnnnnnnnnnnnnnnnnnnnnnnnnnnnnnnnnnnnnnnnnnnnatagcgactaagaaattttttaagagattgattcgacaactaattttgttttttttttaaaaacaaatttaatctactatatatatatatatgtatgtatattgtgtgtgagagaaatttgtaatacgggggtgataaacgtaacaactccatattcaatcctttctaaataataaaattaataataaatataattaatatcgttttatttttattcattaataataactatcttttaaatacttaccttaattataatatatttgtttcagcccaattagtaaaataatattttgcaactaaatttttgcactaactatataaatttaatttaatttttaattttttatataatttttattttgatttatcaattgatttttaaaaaagtttaaatatatttttagtctttataatttaaagcttttatgcttttagtttttgtaaaattatttttatttccaatcctttcaaattatatttgttttattttttgtgtttgtaacattttagataatgttttttttacagtttaaaaaactatattaagtattttaaagattaaaaataaaacaaatataatttataaatattaaaattaaaataatagttttgtaaggacgaaaaggaaaaataataaattagaatgacaaaaaatatatttaaacaaaaaaaaaactaaattaatacatgtataatttagaagaaataaaattaaaaaattataaatgtttagactttttaattgttggcaatataaataaattatctaagaaacaaaattattttgatatgaaacacaggcaaaggaagaaaaagcaaagaaagagttgaatcgaaatgaaagcctttgaggcagcgtaggctataaatagaagtttgtgaattgaaagggttgtatccaaaatcctctctagttttgttgttgagttgaaaggatcaatatgaatcagaatgtttggtggcttctaccgtcatactttatcttccttctttttctttttcttccttcttcttcctctttctgcaaccaccttgacaactctgccttgctacttttcaaaaactcatttgctctcaacactacacatgattattattgttcctctttttcttcaaagacagaatcttggaaaaacggaacagattgttgtgagtgggatggggtcacttgcgacatcatctcaggccacgtgattggtcttgaccttagctgcagtaatattcaaggtcaactccatcccaacagcaccatcttcagcctaagacaccttcaacgactcaacctagcctttaatcatttttctggctcttcattatactctgcaattggtgatctggtgaatctcatgcatctaaatttgtcatactctggattcactgctcacattccctccacaatctctcacttgtccaaattactgtcacttgatctcggtagttatgggaatgaaggaccgagaatgagacttgatccatacacttggagcaaactcattcaaaacgcaactaatttaagagagcttaatttagatgacgtggacatgtcttgtatcggagagagctctttgtcattgctaaccaatctctcttcctctttgatctcccttagtctcggagacaccaaattgcaagggaatctgtccagtgacatcctctgtttacccaatcttcaacaaatatatttggatcataataaagacctcggaggtgaacttccaaagtcaaactggagtactccactaagttgcttgtatctctctcagactgctttctcgggaaacattcccgattccattggccatttgaagtctcttgacacactatctctggggggttgcaattttgatggactgcttccctcatccgtctttaatctaactcaactctcccatttagatttaagagagaataaattagagggaccagttccaagggaaatcaataaactttcaaaattgcggtatctatggttgtctgataacaagctaaatggaacaattccacgttggtgttattctttgccttccttgttatatttggttcttagcgacaaccacctcacggggtcaattggtgaattctcatcttattctttggtacgcttgtcactctctaataacaaactgcaaggtaatttgagtggtcatctggactttcatcatttttcaaagttaaaaaatctatctagcctcgatctttctcacaatagttttctctctattaactttgatagtaccgctgactacatcttacccaaccttgaattcatatatttatcttcctgtaatattaatactttccctaaattcttagcaccacttcagtatctggtcggactagatctttctcataacaacattcgtggaagcattccccagtggcttcatgagaagctcttgcactcttggaagtacattgatcatattgacctcagtttcaacaagttgcaaggagatctcccaattccacccaatcacattcaatactttttagtctccaataatgagctgaccgggaacattccttcagcaatgtgcaatgcaagctccctctatatactcaacttggctcataacaacttgacaggccccattccacaatgtctgggaacatttccttctctttgggcattggatttgcaaaagaacagcctttacggcaacatacctgggaacttttctaagggaaatgcactggagactataaagttgaatggcaaccaattggatggaccattaccaaggtctttggcccactgcaaaaatctggaagttttggacctggcagccaataacatagaggatacatttccccattggctagaaagcctccagcagttacaggtactcagtttgcgatcaaataagtttcatggtgtcatcacttgtttcggtgccaagcatccatttcccaggctgagaatttttgatgtctcaaataacaattttagtgggcccttgccagcatcatacatcaagaactttcaaggaatggtgagtgtgaatgacaaccaaactggtttgacatatatgcgtaacagcaaattatataatgattcagtagtggttgtaatgaaaggtcaatacatggagctcaagaggatattaactatcttcacaaccattgatttatcaaataatatgtttgaaggagaacttccgaaagtcataggagagttgcattctctcaaagggcttaacctttcgcacaatgcaatcactggtaccattccacggtcctttggttatttaagaaatgtggaatggttggacctctcatggaaccagttgaaacgagagattcctgtggctttgatcaatttgaattttctggctgtgttgaacctttcgcaaaaccagtttgagggtatcatacctacaggtggacagtttaacacatttggaaatgattcctatgctggaaatccaatgctatgtggaatccctttgtcaaaatcctgcaataagaatgaagagtggccaccacattcaacatttcaccatgaagaatcaggatttggctggaaagctgtagcagtgggatatgcatgtgggttgctatttggaatgcttttgggatataatgttttcatgactgggaaaccacaatggctcgcgagactagttgaaggtatgcttaattaatgaagagtgaaaaggacaaatcatagtggaaggaaatagtttacccatagtttaatatggttcttttgtgtgttgctgtatgttttctgtaattttaacttctgtcctttgtgtaacaaattgttggataatttccgtttttagttgattgataatcttatctttatttggtaagatatttatttggtaagatataatcttgcttttatttgataagatataatctttaatagatatcttttatttgataagatatatttgatggcttaggcccaacccatttcatcctataaatagatgagtaagggtggaggcaaaacacacagaaatttgagagcctcaagtgacagtcttgagtgtcatatttgagcgagcctgcgtgctctgcatttgagagattcttagagagtttaagtgaaagactctaggtttcgtttgagtgaccaccattattggagaggttgagtgtaccaccactttggtgtgtttttgattcattgtaacccatatttgttatagtggattttgatactagactaggtcccgtgagtttttcttttctcacattgaggaaggttttctcacgtaaaacagattgattgtctctctcgctcccttttgattttattccgcttccgcaatttgatatttgaggatccgagattacccaacacaaatctcatctctcttgagtgatgtatttcaagttatttacaaataagaaaaaaatgtgatgatcgtaaatatcaaaatgagtggtcttcacatgtgatgttattagctcaaaaactttgattctaatctccaaagataaaaacttactagcccaatagccaccacttgtatatcaagcatgccatagtacgagctaagattaaaactgaacttttaatttaaaatttggtttctcctaaccccattacatactttctccaaacaactatccctaaccaactcagtccaattattaatttttgctgcatgatgatcgtagatgcgccctaggccaatgtgtccccttgggaggttccttgagtgaaaataaataaaacaaagtcaccataaaaatagccttctaatgctctaaatgctggcacctttgggaggctttcattaatttggaagttaaaacgatattggtaaatatttggactaataaaatgaaacaattattgatcatactagtattcacacagcaaatatgtagcaattgttcttgaaatcaaatttattgtctgacacaatatccggatccatgtatttctgggattggtttgtatagggtggttttttttatcaatatatattaattattagtattgttaatttttgtgtagaaaagttatagcttgtttatttattggatgaattgtttttatatgtatacataaattgtatttgttgggttatccgatgtatcgatattctctttctttaatgaatattctttctttttttgctaggaaaaaaaatagtacagtattagaatcttaattatttagttttgcatatttcaaaaatttataagatccaaaaaatgaaataaaaaagggtgaagttttaacggtaatccaaccaaatttgcacttacattttaatgtatatgaggatattaactacttaattaactaccttcacaactattaacttatgtttgtcacttcttctcaagatgaagttttaacaataattcaaccaaatgtgtacacaagtttagggtgcttgacttaaaaccttcttcaagtgtacctgttatagaaatagaaacatatattgaagttgacatactgctcttcccataatattagctaaaagattctgattatcagctctaaagttaaaaatttagaagcaggagcttataacaagcaaggtaggtcctgagattttatgacaaaatagatatataatatcataacaaatatacattttatttcactagataaataacataattttaataaattttaaaaaaatatcatattttttatttaagatactcttatattattatctattattctatttctatctctaaaaaaattaaatacacataattatttatatataacatatacatgacaaataagggacaagatggaaagcagtgttagactctctttatccacgtccatgcaaaaggtaagaatgatttaaaaaagatcattttgtattttttaatccaatttactttaaattatatttttttaaaatattaattaaatttatgatttaatttatttttttatatttgatccttcaaaaagaaaattctctatctacatcattatcatctatcattgacaaaatatcatttcatattaaagcttagatatattttattctttatgaaaatactaattttagttttatttattttataattttaatttttttgtgtttcttcaatatgttgatatatcaacgaattaaaaattcaatcaatatgaatatatgattataaaatgttagaaaaattaattaaaagagtgtcactttttaataacattaacacattttaatttaaataaaaattgaagcgtaaaataaataacaactctagtttatttataaaaataatataaaaaattattataaaactataaaattaaattaaattttgagtcccttttaatcatagactcagtgtcatcatcgcacctccagacgaccctcaggtcagccttaaagcattgataatttggtatgcatggactgaaagttaaccaagtgggtctataagcatcaatgcatcatcatcattggtgtcatctacggaaaacaatactgaacaattaatgtaggaattcgtgctaattctcttgaatggcacttctcatgagcattaaaggccaccggtattggagttttgaggtaaatgaccaaatgagtgaattggaattttatgaaaatctcatgtataacgcacaacataaaaccagagcattagatagcttgaagttcactattcaggtcaaattttttctttatgtaaatcaaaatctagagaatttttcaatgaagtatataatagaaatattcaggtcaaattttgacagtctgatccgtgaaacaagttttctagcattgtgcagtttgagatctgatggttgatgatgttttaactaaaaaatattacttttaaaaactccctcttttcataagttgagataattttataagttgttttttttttaaggaaaaaaaatccttctctttttttgtttaccaaagtggatggattaaaaaactgtggaccacgtgtttttgcagtcactttccgttatatcaaacagagcttaaaaacaatctatttcaaggagaggtaaaaaggatcctcatcatcccattatttgtctagtaacaatattaaactgctcatgctaagatgcaatttttcaagcgatccatgttcgtgagaacactcaaaaaatcttgaaaacaattgaaaacacaaattcggtggttgtagggatgatttgcataaaatcatcccgcacttcaaattagacgcgcaaataaccaaatccatcattgaatagtttttagtacatgtcattgtcaaataattaaacagcctattcctcatagcaacaatattaaactacctattcgtcatatttattatccttcacttctaggcatgcaagcaactaaaatttagttaaagttaaactaattttctttaaaaccgtctgcggttttgatttgcaagaatttggtgtaagattgaaatttagtaggtgaatatcggctaacagtccaaacataccattaatactctttttcaatttgtaaacagaggaacttatatacaattcactcatttaagagcattttcggcgttgtttagtctaggttttttaaagtcaaggaattgtgcttaacttgatttatggttggaacaaatgacctagtgttgcttatccaagcacgtttcgttgctttaaaactttttaattaaaaaaaatcaacttttcaagcttacaatcaacagacaaaggagggaagtttatataaaaacaccaaaccaattctagaacagaatcaaacacaattaaattaagacccaaaaattaaaaagaaaaaatacaatcaattttagatctcacaactataaactctgagcaaagaaaggtttatggttgcaagttctaaatttaattgtattttttaataattgtgactatttgttcgaaggagttgagcaaataaaaagtcgcattttcaaatcccaagttattcttatttatttttgtaatatcacaattcacaaggacgtagcaatgcgttggaggctactacacaaattttcttttcctttcttctctagataacgcgtcaagggaaaactcctaacaaaattggctaactgctctattctcaacctacaaacaaatcttccttttcttttcaaataattgcaaagaaaatagagtaatacaaacagctcattatgttgataaatttagatatttgttggattagatttgttatatattattacttataacacttctaaatgaaatttaatttttattattattaatttatgcacattatattattttttatttaatattactaagatattaaaataaagtattaaaattgatttgacttcaactcaatctcaattaaattattaattcttgaattaatgtcttcatcgccgattcaatgatgaatccaattctcacaacattggtttatatcctaattagtgtatctcgtcttgctttccaccttgtgaaagaaaagccagggcagcatgtaatggtacttggtaagagcaataagtgtttgtgccacgcatttctgaaaacatcataaagaaacacctaggatgggtctgtctagaagcattttctgccatatcatctgctattagtagtaatacttttaatacattaattaataaagtgaaactctaatttaacaggagaaaaatgccaaaaacatctaataaacgtatatatgttttctccaattataattgtacatataccaccaaccaaaattccaaaactctaattataagatgtttggttattgaatgagaaacaagatgaaagattgaacaataaataaataaaggcttaaatatgtttaagattctaaataaataattaaattttattttaaatttttaataaaacaaattgttgttttgagtcatattaaaatgtttgttttaaatttttagataatgtcacctcacaaaccgatatttttaacattatcaataattatgagtatttaggaatccggaacaaaatttgatcatttatcatacattttaaacatatttaaaccataaattaataattaactgattgttgtgagccagcatgtcagacaaatgttccacgccgcgatacttaattggctgtggttttagttgatataagagaagcaattgtgagcggtaagcctgattttggatggattgtccaaaccaaatagttgagcccggtctcaagaatggccacaacctccgaatggcatccttactcctgctctaggatatattttgatgctatttttttctcggtttctttatatttgttattagcatttaacccatgatatacacggacataagattaattatacattcacaattatttgtattttatttaaaaatttataaaattgtatgagaagtttaagttgaaatttatcatttttaagctaagcccaacaaggatggaaatattaaacgaagaaatgggcagaactggctaacccaaataccaatgccttaaattttttctctctctaaatttaagtgagatggggggattagtaacagctaggtgaggcgaagaaacagaaaaaagtgaaataaaaaagccacatgagatggagcaaatgatgcggcaggaaactatatttttatgctaacggggttataccgaggctggcgagtctcttttacaacattacattaaatctgctacaccatttagcagccctcacttaaattaacactactgactgaacaaaatctggaagcaatcaagatgaacaaaaaaagagtcgaccaactataccctgtatacactcactaatccaaaaatcttatgtactgatacagtgcagtgatgatgatcaatgacctcaacttgaacaacttccacacagttggaagtagtaaagctcaacaggctgtggtcggcagacagtgttgagatccgttgacagaaagaattacataccacaattctaatataaaacctgcagaaaccacctggattgctgatctcactaattgtggcctatacagagtagcctttcgctattttccctgtttttacaaaagcccgtagatgtagcagaatatgccaaattcatcccacgcaagacgagaactcatcaataccagtttcctaattataaatctttactggcttctcgaaagtgtgccgattctgaaacaaaacgcatgcaatttgaaatggtgtaataaaacaaagttctctcaacctcaaaactaaaacccagtattaccagaatagtggacaaccacaaaacaattagaaagaccaaaatgaacttaataaaaattgctcttgcaggctaagttacaaacctggttaacagcatatgatcttttaggagcattgtcagtatgctccaagccaagatactgctcccaagcaccataaacatctctcctctatcacaagatacaatgcaagcataaattcacacatgaaaatgatgctaaatatcaattgaattatcacaaaaaaaaaaaaaaaaggaatccaagtataaatgaattacctgaaaacgactggatacaatgtcagaatcctgaaggtattcaggacgccctaatgaaaaaaaggcaaatttccactggccaaacaagaaacataatataaaaattagataaattaacaacaaatttactaactaatatttataaacaatgaaccttccatcattcaaagaaaaattacttgaaaaagaagcataatatacccatagaatacactaagaggaaataccttgacaaactcatcatcaggaacttgaagtttcttctgtattcttactttaatttccgccaaagtctccccttcatgtatgaccaagaaaaagggttccccaaagttctgaatttgctgtcatatcaaatcaaatgggaaaaaaaagtgacaaaaaggttggaatacaactaacgtcagaatgaaatatcaaagccatcaaaatattacaaactccagtaagcaaaatgaatcagttaaaaattatataccatttggttctgagctgtgtctttagtgaaatgatacacatgaattagacgatcatgaggacccagatttttctcttcttctggtatctggaataccaagaaaaaagtgacacatttattttgatacataaactgaataaataaatgaaactataattgagtatttagaaaaatccactggtgcaatcatttcaataaataaaagcaggaagaattcatggactgaaagccatctcccttcccagcccactcaaaaacacaaagagactactacctcctctgcacgtaatgtccagtattgatcattaatgttttcaatcttttcattgggagggaagacctgcacaagcagaaagacaagacaaaatgaacatatttcaataagaaaattggactaatgtcctaaaggtaattgcaatttcagtggcacaaaaaatgggaggatcatgagtcaatgctaaattaagtatattgaattctgattcttaaataattttggtcagaaaaaataatcaagagtattaataaatccaggagcagttaaaatagagataacacaacaccttgtatatcttgtgatagaaaacttcaagcaacctaagctcggcttcatgatcagacaattccacctgtaaaaaatgagcacaagacatatttcaaaaattaagctgaataagcataactgaggaaaagacaagttgacaacattatgttaaaaatttactacttcaataactaaatgaagtactgaacaaaaccgacaaacatggcttcatgtatcttttgtttctaaatacagaggaagccatgagtgcacgttggttgtaattgtgatttcagtgatgagtaaatgtacagtttaggcatgttgatgaactaaataatactcatgcacaatgacctttgttttcagatcatcaaggacatcccccacagtgctctgctttgggagtctgatggtatgaataaccacctgaataaacaaataaaaaagtgtcatggaaaataatctagataaaaaccaaaataaaatcagattactatatactcacttcatccttggtagcatggtgaaatgcaactttcagagttttcaatccttgtaattctggcagagggatgtcaagtacttcatagtacaatatatccgaagtctgaaatgcatgaaaggaataagatgttttgctttataaataagaaacaagttgaaagttgggacaagtcaataattacctgattgtagtgaaccagcatatcagacagatgttccacaccacgatacttaataggttggggctttggttgttgagagtagcaattatgaggggtaagcctaattatggatggatcttccaaaccaagttgttgagccactttctccaccacatcatcatatgtatagagccttgacctagaaaatatacatagtataagatgtggatgcaaatctaagcataataatatataaatacttacatgtactctaaagtaaaatattgcaacatattaaatctaatgatttgctccaataaattacacaatgcttacatctccaggcagaagtcatcttccttgggcttttctagagatcgaaagtgaacaacctaaaatacataaattagacataaaagaattagcagatatcacacggtaaaaacataatgaaacttgcatggtatattggttacacacatacagatatgtgcaggcgtggacaagggggaaagaggaggaaggggcagaataatatgactcaataaatgggtagagtttcatttttgcatatcaatccatacaaaatgcctttaattgaacaccaaaaagaaaaatacctggcgattgtgcacatattctaggtatgaaggcacatctggatagcggacatgttcactatctatagcaggagctttctgaaagcatataatatctccgtcttctaactgcaaatatagaaaaacaaatcaataaaccaaccaaagatacagtaactcaaagtgcatcaatggtgtttataatttacctggcttgctcgaaatgtaaatttcttatcaatgggttcacacataacatttggctcaaacttaatttcctgcagaataatagtaggcacgttaaattcacaaatgccacacaattcaagtcactcgttgacatcagaacctaaagatgaaaaataaaaataaaagaaggtccttctttagaggtcaggctcatgcagaatagatctttgttgttgtaacatattgcactttatttgtcatcaatcatcagtaaatttaattattaaacaaaagagactaagaatgctaaatccaagcctaatatctcaagaagcatattgtgtttagatcatacaaggatgaactacagtctcaattttcaaggcattctgcaactcaaaatattaaacaatagaacacaaacctcatatagtccaatctcttcatcaggatcataaccagccattttatttaacctggttaagatttctgatggcttaccagtactcttcacaaagagccttccaacataactgccacaatagggaaatacatcttatgtcaacaaaggttcaccttttaccacatccgcatgttaaaataagacattactcagtaccgtagctcctctttttcaggatcatataacttgaagaacagtaatatatcatcctttgtcttgtctggcggtgcaatgggacgtaaatcctaaataacaacatagtttgtcaaaaggacagaaattcggatattaatggttcatgctatgaaaatggtatgcaacttccataaatacaaatattaccagcccaagctccacttccaaaagcaatttcaattctgcattgtgaaccttgtttgatacctctctcaattgtccaacctgcaatgcaaatcagattgagaaaagacaaaatatataaatatatatatatatatatatatatataaaccttcagatcatatagaaagagacatgccacaaaattaagtaccaaaagcgggaagatataaatcacagaaaagttagcataaccaacggcataataaccaaaccacaggatccccaaaaaatagtatgaaaaaaactttatactggttgctttctttattcattttcaggaaataaaaaacaattagccaacaatggcaggcataaagtaattataagcaaagccaacacggaataacctgttgggacagcccacgaaattgaatataaaataagcaaccggacaggacaattatgaaattggcatgttgattaagaaatgaagcatagaacagattcagcattcaacaagtgcagggtaaacaggcaattgatataaagctcaaaggagagtatctgagaaaaataatatagagaagcttcaagcaagctcaagaatttacagattgtgcttcttccatgtgtgtcaatggtcgatttggacgatacgtatggttttgccgctttgcccatagccaaaagcgctggaattgaactggtatgccaaactctttagcaacctcttcctgcgtatcccacagataaaccagcaatcagatttaaaaaaatcaagcttatgaaaatagaatgtcttttgagcaatcatctaagaacaacagatacttctaaatagtagatgtatcatgtcatagctgttaaatatctatccacgctaaacacttcataaatacttgtacacttttagatgcatttatatattttttttacttttctttaatttttatgcaaattaaattaaaatagcataataattagataaattttaacattttattgtgtctacaataactaatgatttttcaaacatgaactctctttttagatataagacttttatttcatgttaatattaaattgatttgatgcatttatattataactgtgtttagtgctataatttttcaaatttgctgtgcccccatgtctgtgccaatcatatctgtgtcccttatcacttttgtgccctttcttctaaaaaaatttctgaaaatatccatgccaagaaacttgctgatttctatcgtattttggatttattttccagtcagcagcatttatacaatatttttctgtcaatggataactacaatatctccctcttaaatgagtcattaacaaataagtcattttgtcagaaaactagattgtcctatattccaatattttcaacaaaaaagcaaccgcttaacaatagagatttactagagaccaaatcaaatcagacaagaaacaaatagggtatgccaggtcaaaacacatctagcaggagagctaaaagtgtgattaatgatgataccttaaaaaggttaaaagacgtctgtttttgaacacggaaactcctcactttgtcatggtctacaagatcaaaatatatatcctttccaatctgctctgcaaggtcttcatcacgtgccacctaagaagtatcacatgttaacagtttaggattaagcaacccacagcatctctatgtgaggacacaaacagtactcaattctaggatagcaagttaggaactagccaactacgaacctttataatagtgtaaaggtgagcctctgctttttctttctttttgtgctctttttcttcttgttctttcttcaacctctcctgcattaatccattgtagaaattcagtgcaaattttccagaataaagcagtagaaatagtacaacagaaatttaaaagacaacagcaaagtgagcttggtttgatattggcttgagatacacccaaggaatttctcgtgagaaaaaacaaaaaatgacttggtttaggcagagtttaaattttgtgtgtaagagagatcaacttacacatagctattcttacgccatcaacaattttaggcagagtttaaattttgtgtgtaagagagatcaacttacacagctattcttacgccatcaacaattttgtataaaatgtgatgttcatctatctaaccgttgactaataaatatatactacctatattattcatgtcaaatccagtaaaaacaaaagataatcaattaattcttattttcatatatttcaaaagcggttttttttttnnnnnnnnnnnnnnnnnnnnnnnnnnnnnnnnnnnnnnnnnnnnnnnnnnnnnnnnnnnnnnnnnnnnnnnnnnnnnnnnnnnnnnnnnnnnnnnnnnnnnnnnnnnnnnnnnnnnnnnnnnnnnnnnnnnnnnnnnnnnnnnnnnnnnnnnnnnnnnnnnnnnnnnnnnnnnnnnnnnnnnnnnnnnnnnnnnnnnnnnnnnnnnnnnnnnnnnnnnnnnnnnnnnnnnnnnnnnnnnnnnnnnnnnnnnnnnnnnnnnnnnnnnnnnnnnnnnnnnnnnnnnnnnnnnnnnnnnnnnnnnnnnnnnnnnnnnnnnnnnnnnnnnnnnnnnnnnnnnnnnnnnnnnnnnnnnnnnnnnnnnnnnnnnnnnnnnnnnnnnnnnnnnnnnnnnnnnnnnnnnnnnnnnnnnnnnnnnnnnnnnnnnnnnnnnnnnnnnnnnnnnnnnnnnnnnnnnnnnnnnnnnnnnnnnnnnnnnnnnnnnnnnnnnnnnnnnnnnnnnnnnnnnnnnnnnnnnnnnnnnnnnnnnnnnnnnnnnnnnnnnnnnnnnnnnnnnnnnnnnnnnnnnnnnnnnnnnnnnnnnnnnnnnnnnnnnnnnnnnnnnnnnnnnnnnnnnnnnnnnnnnnnnnnnnncacaatggcagcaatgaggtttgaatctagaactccatgcaaactacccaaaccaatcccccacatgaatgaggtatcaaataattttggattaatctaaaattttgcaaatatgatctatttgataagaacttcgattacaatgatgggtttaggaaaaaattgctgaccaaaatgttaataaatagtgtgaaagtaggtgtaacttacactggggtaagttgctcctcatgtatatataaatagatagataacaaacataaaaataaaataaaaaacacagttgagaacttcagcacagtcatcaagtatctgaacagaacatgcttatcttaaaataaattagccatctgcatttctttagcaagttaaatttaaatgcagaagacaaacatgtagctatttgacttggcttgatttattttaaaccctaaagtacctaagaatagtcacttacccttaaatgttcagcaatgtctttctcatccacattgcatattactttgtccttgtcagcttcacgtatatacaccagcatataagcatttgaatatttggtgaatttaaaaggagtgttgttaaatccaggatttgtctgcggtaactgttaaaatacaagtggttaaataaccaagaagtaaatgttcaaatactagcaacaaccatttgcaaaaaagcaattacctcttcctcgccaccatattgctcctctaatgcccgtttagtgtcttctttagtcaccctctcatcatcaaatttatacctaatattcaatcaaagcatgcagtgaagtgctcagtaaagcagcaagaaatgcaaaacaaaataacaaaaagaaggtgaagggactctcagaaagttgcatgttatatccaagttcattcataaccattattagaaatgtagattatcaatctaatgacaagtgtcaaacaaacagattctgcatttcaatcgtttaccactgcaactgcctcatttaaaatataagatacaacatactctcatgcaactaataatggtatcatttacaaactacaaattatgaatatgatttttcagttgaagtttagtccaattttatcatttaggaaatattttccttatctatgtcattttcatcacatatattttataattttatctgtaataagacactcttttttatctctgtaataaaaagctcgtttttgacttacattaattgtggttctgactttcatctatagatcacccttaaaaaatcagtatttgtcacatgatcctgtgtgcgtaacatataatcaatgaatatgaattttcagctttaagtttagttcaatgttataatttacaagatattttccttatctatgcatatttatcacatgtacttttatgtataactttgagcatttttggtagaatcttacgatccatgttttgatccttcaatttacgatcttatgacttatgtaagatctcaattttgacaacattgggtatagctaattattcaagttttctcacaatccaaaaagcatgtgatgtggcccctagtagtcatcatcacacatacacaaaaacatgtagctcatatggcactgaaaaattcagacctaaaagcagagtatacataccactgctcagatagagtcggcctgataaaagcataataatgtccaccatgcacaccaccactgtgaaccaaaacactgtggaaaaaatttaaatctgtcaaataatgaacatcaccgataaaaatatgcattcacataaaaagaaataattgcacactaatggacatcatcagaactaagaaagaaaaattacaatttcaatgaattttattgattaataattttaaagggtaacttttaaactttaacattaacaatccaagtttactgtcccaagattattcaaaaatacaatcccccacttgatttggaaaattcagaaggcctatgagatggctctcccaaagataaattgttttcttctttccattatctatcctcgcatcattttctcctcatcctactttatcttctttttctttctatagattgtagaagccacagaacatggattgtactagactaagtaaatgggtaaaaatatgacaacatatatactgaaagtggcttctaaaaaaatcaaaaacaaaattgggcatcatgcaccaaatcacaatcaccaaataaaatatcatgaaacaaggacaactcctaaagaagtcatgaaaagagagatcactagaagagcagcccaaataaaaaaccatgcagtctgcaacaaatacagctatcattaccactacattacctatgaagtgtgtaaagattgcggacattcctatcagcatcaggtgataaatattttccattctcacgatcaaggtcaagttgcaagggaaactcataacggtcattaatctacatggaagaagaagaagaaaattaaacttccaattacagaaaagggagtttaaccattccatcaaaagagaagagcccatggactgaaaaataaaactaagtaatgcccataatccctctagcagaatatatcccttcaactgattgtttcaaatgacatacatatattttaaatacatgcacacacaaacaaacaaacaaacaaacaaaaagatttcccaccaagacccagagcaaaaataagcaaaaaaannnnnnnnnnnnnnnnnnnnnnnnnnnnnnnnnnnnnnnnnnnnnnnnnnnnnnnnnnnnnnnnnnnnnnnnnnnnnnnnnnnnnnnnnnnnnnnnnnnnnnnnnnnnnnnnnnnnnnnnnnnnnnnnnnnnnnnnnnnnnnnnnnnnnnnnnnnnnnnnnnnnnnnnnnnnnnnnnnnnnnnnnnnnnnnnnnnnnnnnnnnnnnnnnnnnnnnnnnnnnnnnnnnnnnnnnnnnnnnnnnnnnnnnnnnnnnnnnnnnnnnnnnnnnnnnnnnnnnnnnnnnnnnnnnnnnnnnnnnnnnnnnnnnnnnnnnnnnnnnnnnnnnnnnnnnnnnnnnnnnnnnnnnnnnnnnnnnnnnnnnnnnnnnnnnnnnnnnnnnnnnnnnnnnnnnnnnnnnnnnnnnnnnnnnnnnnnnnnnnnnnnnnnnnnnnnnnnnnnnnnnnnnnnaaaaaaaaaaaaaaacaatttccatttaaaaattaatattaagaaaatccctgcagaaatccttcatgattttcaatatcacaacacactattgtacagcacaagtcgtgccgaatcactttcttacatgaagtaacagtactgtaaattaatacataccacaaataaagaaggatatcactgtagattgtcaagaataagtaattaatttaatcaatataaccttcaatggcattaatagtgagctagagcaaactgactgaaacgaaaccatattactctgactgaatgctaacttcttcatatcctagtaacttgaaaagaaaatatgatatagagcaatgagtctatttgactactaaccttgaccatagtatcccgcataaagtcatattcaaatcttttcagttgaagctgaagaacaggagggaaatcaatgaacagaacacccttcttagcatcctgaaaaaatgaaaaatcatcggtttatacgtgaaactatattaaaaaatgtatagattattgcattctgacagcaactataagaaacttaaaggattcagaacttgacaattgcaaacaaaacgatttttgtacacccaatataagaactaaaagattcagaacttctacaaatgacttattacaagtagattcttaaataaacaattgcaaccaacctgcaaaccatattgttccgcatgatatttgttatccccttcaagacgttcaacttcaacatacttgtcaaaggaagcataaacatcaggacagcctttcacatcaagctgaaggtctgcaagtatatgtaaaactaaattagaatcaagtggcaaggtacaattaaacacatagcttcagtcttaacatggaagtaccataaaatgactcctttctagttgatttatagtccacattgatgcattcgatatagttcatatgatgcccttcaaatagcttctgtatagttccctcaacaacagttccctaaagacaaaatgaacataatcatcatgaatttgagacagtattccacaaaaaagtttgtgtacaaaaaatccaaagatcatcctttaccttcatcttgtcttcaagtttttcacagaggactctgttcagttcttgaacatcatgctgcatgaaagaatcatatgtatcccatccaaaagatttagtgagctcctttgttgcaacactggtgtcactatactggagcttgtagaataaactttgcaaagccaaagggatgcttgcagagggcatgtcattctctgttgttggcatatggtatacagcctgaaatatgacatccaggacccaaatccaaacttcctcatcactatccagtaaaaaaataaaacttctgaagaaaaaaacaataagagaaacaatgcctgacctttcgaaaataaggaatatggtacaaagtttggagtagagaattcatataacatgtagctccctggttcttgagtccaacatagccagtctcctttttagaatcataagtccagtaatcaacaattctacgaacaagaacctcggcttcaactacaagagtatcattcacaagataccctctactaggatcatacaattcaccaagcggcatgaaagatgtgaaaccccaatcactttcccgcgcattgaattggtgctgtgtgtctacacagtgtaaaatgaagttagacaaagcacatggctatgcacaaaaattatgagcattttcactttattcccctgtcacttctgtttcatggtaaatgctaatgagtgcccttagcttagggcacctgttaggaattcaaaaatacaaagtattaaataaaaggtcaaacattttaacctctcaatacattacatgcattatacaaaaacagtttccattttttattacttaacaagagcccttatggaattcattagtgagagtgttgttttatttaacatgttaatgcttacagttcttttaagataagtaatataactctatccagatttagatccaatgttacaaggaaaataatattcaggaattaaatgtttttaaatatatatatatatatatatatatatatatatatattcaagaattaaatgttcttaaattatttgcaacaaaaatcccacaactttctttactcttacttcaagcaatgatcttttctacatacatacacagtacatcatcttgcaacaattgtacggaacaaacttaacagactaccttttctaacagtgtatttattatggatttgattgacgactgccaagctaaactgtgcatatctactccagccatagggtaaactagctgaatctgcaacatccaaatacatggacaaatagtccacattgttcccttttgggaaaattagtacacgcctgcccagtaaaaaacaaggttcagaagagatcattaaagataagcacatcattaatcaactcggacagtaaaagcatcataccatttataaccaccaacaacaaatatttcagaatagagcttctttgtattcatcctagaaaagttgtcaattttccatgtgaaccttgacgttgaaggatcctcaacaggctgactctccacagtgttggcagcatcaggttgagccacaactaaccaatcatcaaaataaatgaaaaagaacaactaagtatcatgccttaaatcagctgaaaaccaggggggggacaataaataaactagaccctctactcagttgcaaggaaagagagagaaaaacaatgataagatcaatcaataaagtcgttgaaaacacacaacctctccaaaatgcaatcaaacaagaaatcactttttgtcaggaaaacctataactctttaagaccaattcgtcacaagttattccctctctgtctctctggcaatcaaacaacgcatgaagtgtctccctgaactcttaagaaagtaagaaactattcaaatcgatcatataaaagccaacaaatagagtaacagaaaaagcgggggtttctccacggatcaaaagtgtgagaaagcaacaagtaccttccatgggttggtgattattctcagccaaatccgtgtgcgggacaagcatctcctcgtcctcctgctgctgctgcaaaaaccaaaacacacaaaccaaaaagaaatcatcactatcaccctacttcggatccaccgaaaactaaccccaatcaaatccccaaattccgagcacggaatgcatcgtaattgaagcaaattccactcgcgcagatcaaaaccacaacccctaacacgaaacccccatccactccgcggcaacccaaccctccccaccaaaacgacaatcaaaattgacaccattcgccgagacagcaaaaaggaacaaaaaccatgcaagcaaataagagaaaacgaaaaacgacgagcgaaattgaaaacgcgcgagtgattggaagcgcggagggagttgcagagtgaggggtgagggaacgtacgtcaatgggagcaggagtcatgacagtcatggcgattgcacaattgacctcgcgtggcgttgcttatggagaagcaatggaagagagagaaagaggagagagaaagggggaagagatcactgtgagaaaacgagatcaccagaagctattgctgtgttgctattgctcgagacaagagggagaaatgtccttggtttttatttggggctttgggcattctcggtatttcacctctcatatttctgtgccgaatttctatatattcaataactagggaaaaaataaaaataatagcatggtcataaatgtggaattttttacggtttcttacatggatgtgtctctaaaccaacaacaggtatcgtggtagttaccttttgtatttttattaaagtgatttaggatttcagattttttatacgaaacaaattgtgggagaagaagaagaatacacacattatgtgtttttataatttccaacgaaaaaaaaaaatgtttcttctcttaatgtatatttgtttctaatcctaataattaattggccatttgattttttttcttgacttaatgtctttacttagataaaaacaaaataagaaaaagtttacaaatttaaaaaatcaattaaaaagaataaggactacatttatgttaatcctaataggtaacaaatcctaattaattgtgtatttaaattttttcaagatttaaatttctttacttagataagaataaaatatgaaaagtttccaaatgtaaaaagttgattgcgaaagaatcaggactacatgaattgttgaaaaaattatttataatttaccatattcgattataaaatatcatattatatatcgtacaagtacaattatattgtatataatacgttaaaatgttacttttatctctataatttattcattttcatttcctataaaaataagataaaaggtcnnnnnnnnnnnnnnnnnnnnnnnnnnnnnnnnnnnnnnnnnnnnnnnnnnnnnnnnnnnnnnnnnnnnnnnnnnnnnnnnnnnnnnnnnnnnnnnnnnnnnnnnnnnnnnnnnnnnnnnnnnnnnnnnnnnnnnnnnnnnnnnnnnnnnnnnnnnnnnnnnnnnnnnnnnnnnnnnnnnnnnnnnnnnnnnnnnnnnnnnnnnnnnnnnnnnnnnnnnnnnnnnnnnnnnnnnnnnnnnnnnnnnnnnnnnnnnnnnnnnnnnnnnnnnnnnnnnnnnnnnnnnnnnaatgataacataaaaaaaactataattacatagtgtcatgtcaatgaggaaaaaaaataaaaatatatatattttagataaactaaaagcaaaataataacacatttacatgtctaaaaaatttaaaatcttaaaatagatattaatataagataaatagttaggtatatatttttggaattataaaagttcatctttgttatttttttgttataagctcatttttaagatttggcttgtttgaagatctagcttattctaaaaggtgttacattaacatgaattaaaatatgttttacaaaaccagaatgctaaatcatagttgtaatgataaagaaatcttattttaaagattttgtttggctaagagcccattttaatgacttgtcctgatcaaagactttgtgatggttgcaccataatttgttgtttttacaaatttttactatagagttaatccataatgtaatcctaaaaccatatttacaccaccatctatgactatcactcaaaaaatcatagtgccaagacaatattgcccttcattgagacatgtctgactaaaatatgtcatcgaattgtttaaaaagttcaagagctaagcctcgttagcatttgtcatgagctgataatttaggctttgtttgctcattttcaaagtttatcttagtttattagacaatctattaaggattaaaccttcaaatagaaagtcacataattagacttccaagctagccaaaccttcaaacaaaataggccaagccttgatgaaaacttaaatccattttttgccctataaatatgtcccttttttttgtttagctcctataaattgtattatatttttgtagttcttataaataatttttttagtccttgaaaattatttttttttgtttttagtcattgtaacttttttaagtgttttctgacgtggcatccaaagcattacatttttctgctaacatgcagcttattaacgttatcacttgttgatgtaacactccgattaaactcacaccagaatgagggagatctagaggttgtgcaagatggaactgtattgttgatgattacttaaaagaattacttatactaaaaaaatgcatctagtccatcacttaagaatttcatcgtaacgtgtgtttgactttgataaattttgggatgggagatcctagaatttttttgtaaagtgtttgagtaagatcaaaatacgttgaaaagtctcgtgttagtttgcgggaaacattcaatgattttgaaagcaattaattgttacaaatgttgttagagttggttgtcgagcttcaaagaaggttacttacgaatgattttgaagtataaagggttataactaatgagaaagctaagtaaagtgttggagagtgggtcatcgagatgtcagctcccaagggcattacaaatggtattagagcatacttctctacctgtatagtgtgctttgacgaaccaaacgaaagctggttgacatgtaacactttaggcgaagaatactaaaatgagttagatctagatattgtgcaaatatgagattgtattgctgaaaacaacttaaagaaatcaatcactactatctataccaacaagatgcatatattttttagtagctcatccattaagaattttacaatttagcatacttgactttggacaatttaagtttctcagaaaacgtgcgaatgatgacaaagtatattgaaaattttaatgttgatttgtgatggtagtcaatgaccatgaaaaacaattaactgttacgaatggtgtccaagcttattgttgatgcctcataaacaataaagaaactaaatgtaaaaaaacaaaataacatattccagttacctctttaaaaacatattccaattacctctttaaaaaatcttaggaactaaaaaaatgagaaaattataggtaaaggaagtacatataaccttaaatataaagaaaaaaaaatgagaaacactttttgcctctttatattttcgtataaaataagttgaaagagagaatagaagttaaaaagaaattaggagatagtagttttgaaaacaattaaaaaggtgtaatagtcaaataaaagtacaaacaaaaataaattatttaaagaaatgtcatctttacataacggtatagatatatataaattcatatgtctatatatataaactaaaataattatcttaaacaaaaagattttgtaaaattattcttaaactataatattttgaagtgtttttctttttaacaaaagtgtttttaggaattgttattaactatcactttcattgattagtgagacatatatgtttgatcctaatctcataaattgattatttattttattttttatttttcattcctttcaaatcattttatttactaataacttatgagtcttaatataattaggctcaacggatctcttaattagagttttggatttaaatatcataaactaagaaacttaattaggaagagaaatctaactaaagtgataaacgatgtttcccaacgaagatactaaaaatatacagaaattatattttatattttactatacacacacaattaaagacactctgtatgtccaaattcttacagattatgtattttggcttcgtttttttcgctgtaaatcgatgtgtagagaaaagcatgatttttttcggttgattaatccctaagaaaaaatttgtgtttactgtctaaaaatttatgactaacaaactattttctttttgtgcaacacagggaacttcttttttgcttcttacggtgtcgtaactttttataatgcttgcaaaaacgttttggcatttctttggtcttgcacccgctgctaggtcttttttattacctcctttgcttttaatttaaagtgtaataattgcccccataagacgttatgaaaagggatgacaaagtgagatagtatataagaaacgggtcgatctgcccaaaaaatataggatagattgacttgactcatttgaactaataatattagtttatcttattttttaagaggttaaatatactgttccgtcaaattaaatctattttgtcataagatccgtggatgataaaatggatgaacctattaaaaatggactgcaggaccttagtccacacaaaaaaatgtagacctattttgtaaaataaattaataatattaatttatctcattttttaacaagttaaatgaattaacccatcgaaccaaacttatcttatcatttatatcttatatatgtagtatgaaacttgttgaacttttgatttaaagccaaaatttgtaccaaacaagatattggacatttatttttatgaagaaaataatttaatttttgttaaacataaataaattatttatcaaactttattttatacaataatttaactacgtaatatatttttttacctataactaattgttgatcacttcaattactaaatttgtgtttatccaatttattgacaagctttgaaacaaatcaaacaatgtttatgtcacagctttctaaattaactccactattagattatgttaagacgtacaccaaagtaaaaacatacacactctaatctaaaatgatttattattattattattatataaaatcttacatcagctctcaaatttggataaaagttgagggttattttagattttctgtaattaatatcaaacttatcaatatactaaacaagaatcatttgtgatagattttgtatgatttttttnnnnnnnnnnnnnnnnnnnnnnnnnnnnnnnnnnnnnnnnnnnnnnnnnnnnnnnnnnnnnnnnnnnnnnnnnnnnnnnnnnnnnnnnnnnnnnnnnnnnnnnnnnnnnnnnnnnnnnnnnnnnnnnnnnnnnnnnnnnnnnnnnnnnnnnnnnnnnnnnnnnnnnnnnnnnnnnnnnnnnnnnnnnnnnnnnnnnntttagtctctaaatttaataatttattgacattttgatttctgaaattaattacatattatcattttgatccctaaatataatttaaaatttttaattaagtctcacattatatataaattattagcataatcattatcatatccttattttcattttatatccctcatatttttcacatttcccttactcattctatatttcatcttaatttttacatctaccatttgaatgtaaaggtcgtcattcatttattcaattgagacataatttttaataaataaataatataaaaaacatctttgaaaactttgaattttctcttgataaacattttctagttttcttaaaaaattatattttattcaattaaaaatttcaattaattttgtcaacactctcaatattacatttaaaattattttatgtgtatatataactggtgataatagttcataataaaaataacttttattatttacatgatatgcatgattctttcattttgatagtcgataatttactaatttattacatggatctatgtcattcctcccacttatgcctcctcttaccaagtaaataacacaagtgacattttttccatgacaattaggtttagaggtctgagataaacacaaacatttgagtcaaggaaaaacatttaaccgtaaaatgaatttatcatatatatttgaattttcatcacactatccgtctcacattttcacatatgaaaatggatacttagagcatttttagtgatagatcttaagcaaagatcttaagttcaagatctgatcttcacaagatcttccaataaagtaagtggagagatctccaacataaagaataggttcttgtacaagatccctcaagatttgcacattgttcaaaaaagaataaattttctctttctttctctctccctaagatctcaaaatgagatctaccattaaagtaaaaaattagagagatctttaatcctatataatactataggatccactaaaaaatggtctaaaatctcaatttaaaatctaccactaaacatatttttaaaaaaagtgtcaaataatatgtcagaaatcagatgtctaactctctctgcaattctgcatcttatagactgtacttcgaagtttgaagcgtgaacacctgaaaggctgaaacaacaccatcatggcgtttcccaaaacccgtcagagccactcctccgccgcttctgctccctcccaccgccgtcacctcgcgacgaaagcgacgccgaactggtcacgaagcccttccacgccactgagtcaagcctccagctccacggcatcaccctcacccccaccctcctccgcctcaaaaaccactccaagatcgccctctccctcttccactacgccaaaaccctccccaaccccctctctcccactcctcctacaccctcctcctcgacaccatttcctaaccctctttcgccgcctcatctgcgccggcctcacgcgccaagccgtacacgccttccacgacatcgacgcgacgccttctcagaaaccaaaacgacgcccgaagacttctgcgtcttgctcgatacgtactgcaagtacggccacgtcagactcgccgtcgaggttttcatcaaaaacaaacacacagtcccccccaccgtgaaaatctacaccgttttgatctacggatggtgcaagtttgggaacgttaaaatggcgcaaacatttctaaaagacatgattgatagaggaatcgaacctaatgtttttacttataacgttttgttgaatggagtttgttggaaggtgagtctgcacccggaggagaggtttgagagaactataagaaatgcagaggaggtatttgatcaaatgcgtgagagcgggattgagcctgacgtgactagcttttcgatcttgcttcatgtttatagccgcagctcgtgctggataagctgaggttgatgaaggagaaagggatatgtcccaatgtggtgatgtacacttcggtaatcaagtgtctcgcctcgtgcgggtggcttgaggatgctgaggttgcttgaggagatggtgagggatgaggtgagtccgtgtgccgcgacgtataattgcttcttcaaggagtttagagggaggaaggatggggagagtgcgtagagaatgtttaagaggatgaaggaggatggattgtgcgcaccgagttcgcgcatacgtatgtgatattgattaggatgtttttgaggttggacatgatcaaggttgtgaaggagatatgggaggatatgaaggagactggggcggggtcggatttggacttgtatacggttttgatacatgggttgtgtgagaagcagaaatggagggaggcttgccattattttgttgagatgatagagaatgggtttcttcctctgaaacctttacagggggctgattcaggctgatatgttgagaacttggaggaggttgaagaagaagcttgatgaggaatcgatcacgtttggttcagagtttcagaattatcaattgaagccatacaggagatacgctacattattacacataattctgctataggctatttcaaagctaccagattccagaaagagatatctaagtgggatgtataggtctgcacctcatgatatgggtaaagcttgtgaaaaaaaaaaggttcttacggaagaaagtggaattacaagttacaattctacagaattacagaaatcaaaacatagtggttggatgacagagcattctggagaattctctcctttgaagtcctaaaagaacagttggagggctctggtaacacccatctattgaaatttgaaagtactaaagttcattcttttactagtggaagttatactacaagttctaggacgaggagggttcacaatggaacccctaattcaggaggatcagccaaggcttttcatcataggttcacaacatctagatttgacaactctggtagggatggattggggaagttacaactggtggtagctttcttgattatactatatccgtaaaccaatataatcaccttcattttgaagttcttaaatttatattcattctcttcttttcttttattctttctatacattgtagtgacaaatctatcagcactatcggtctttgaatttggtggggagggggagggggatgtaactgcaccccgaacttcctcttcttgtttgtcttatcatccaagttacgtgttatatttaatgttttaaccaaatgaatgacgctaatgtgcctagacttgagcctttggacctgtgcatgcaaagtctcttattgtccgcattatttggttttattgatatgtattttacataggccaaaatgagacgacatatgtttagatactagatactggaaaatggaaatgatgtgatttcctgcaagtctgtttttttttgggggggctctatgccttttgccaattaaattaggagagtgtagttgtgtttgaatgtaagactccttggcaaatttgtaagacgatgaaattctatgattggaagagcatgttatttatctgatcatctgatgagattggagggcatgttatttaagaccatcttatagcatttgctcgaatgaagaaattctttacaatatttttatcgtattttaaattggtcatatggtatgaaaaacttaattataatatttggatgaatgttgacaagattaattttgaatgaaattaagtttgtaaaattgattttggttaaaattgatcttgaagtgatatgatttatgtttgatgtttttattataaaaataagtcaggaatgaattcattataaaattcttgatcaaacttcaaaagttattcaaagttggttcaatttataatcaaatgtataaaaatatgtaaaaatttatttaaaataaattttggatttggattcaattctttaacctacacatatctctacactcacattaagatatttttttcatttaccatattaattgtaattagaggagtttgatgactatccctaattcttgttaggctgttgtataaatcaaatagattgtaaaatatgaagtttataagttaaagaggtcaaattcaagatattttattcttcttgtaattattttaatgaaatttgccattgcttccatattaatgtatggaaagtcaatgtagaaaatctaataaacattaatcaatatatatttttcttcttaaattcacttttggtcccataaatgttaagaatatgcacttttagtctctcaaaataattnnnnnnnnnnnnnnnnnnnnnnnnnnnnnnnnnnacatttatataacatgcatgacaaatgaactaataatctaatatatatgtaaatgtgacactaataatttagtgacattacaacaatgatcacaatttggatgatccatgtcatttagcatatatttacattgttatgttatttataataccaatgtgtcggtattacttcatcacttaaatataacattaattttgtttgttaaaaattcgatggcagattaacaaaaggccaaaattgctaaatttgataaacattgaggataaatgtgtaacaaatttttgaggggccaactatagaatcataaaactatagagggcaaaagtgatttaagtctatctttttttatcattgatgtaagcttatcttttgtaaccataaatatttttcacgagacaaatatattcaagagtatttacagggttattctacttttcttaacaatatgccatacttaataaacatatgatgagttacaactaaacaaaatattataagcaatttcatataaatctaaaaataatttcacaaagattgttttgcccttttgttgttcgatttacttaaagatcttatcatgagattgattgcgatgagatgatgcttttggtttttgaacccagggtaggtcttacaagattcatttctaggtctatattatatcgtagaacatctttagtggtagattctaaattggaatcttagaccactttttggtagatcccacagtatcacataagattgaagatctctttcattttttgtcgtcagtgatagatctcattttaagatcttagataaattttaatggatcccacatggatcccacaatgccacttttttttcctcctcctcaatgttcacttttctttttttctctcctctcttcaagccaccttttcttcttccttcttcgcgttcttacttcattccgatggatctgtgttttattgttactactattgatgaataattttttaaaaatctgtataaattttaagagtttttgtgatagaactaaatctgcagtttcctgagaaacttcccaggaggtcacccatcccaagattgctccaagtcaagcacgcttaactgtggagttcttatgttatgggctaccgaaaagtagatgcaccttgttggtataggtagtacctattaaatcctttaagttatcctcaactgtacagtcccatacctgcacagcctctggatccctctcgttcgggtgtgtattcgattcattcatgtacccctcccgctggaagcctgccaggagccgctccttgtccgtgcctcactgcaccggcgatcactccccgccctcgtcagcgcccgagatgttacaatagcagtcaccacccacacatgatgtcacaatacctgattttggctatcaattaatgctttaacctattcaattattcttgcttctttctatgtgaatttcaacctttttttctttcattaaagtcacttctagttgtatatatcacgaaatgagaaacctttcactttctcacttaattaattgcacccatctattttcactatgaaaatgtaggatcctcaaagaaattcaaagcaccattttcatctcaaaagcaaataggtaacaaaaaaaactatcatcattcatcacaataatacctcactagatttaaaaagcacaaatctcacatcacattcgaacacacactaaatccaaatcatataatatgtttgcaccccttttttcatccccttccttttaacttctcacgtactcgtgtcccaaaatttttacccatagaaatttttctgaacaaaaacaacccacaacaatttcaaaataacacacccaaaaagaaaaaagcagtctttattactctcttcagttattgcagtcatgccttccttctttcacaggtccaatattcattcttccttcccaagcatttgattcttccaccactttcccaaacaacaaaaccctagattttctctttccaatcacttaattctctgagttcttcacccaaaaggcaaaaaatactcaaagtcccccctttttatttttcatttcaatcacatccccttctcaattctctgattacctgatttattcaactgcttctgccgtttcccctttgcataaaccccaatttcttcacgtggatctctgaaattttttcaccttttcctctctgatcacgaatgggtatggcctagttatactcaacattttatttttatcaaataaaaggaaccgttttttttgccctgaatgagttgatttttttggggtagtttttgttgttagtgtatgttgggttgagatttgagaagcatttttctttgttgccaaacagtttgcagttacagcaacaatgtcagatgacatgctcattcatttctcatccaactcatccaaccaatcagatcagtctctgcctacaaagattgcaaaattggaagctcgcatggttggtaagggttcctccaccactgctcagcaatcaggttggtcctctgtgtttgttccttctgttgggaaatttggcggagctgctgaaaatttggctgaaccatccacttccagtgattctgatgatgatgtaagtcttattatccctatatagtgcaatgtgtgtgggaatttgactgcatttatgaggactattgttgttatggttttggcttatttgcttaaggttttaaatatcggtgacaatcatggtcgcattgtggtttcgtcgttattgttgacatcatggcaaattgtggacaaatgtggccgatgcggtcccaattgtggtcgtgttgcagtcacagccttgatgttgcggcccaaatcacgactgtggaccattttttaataccaacgcttgtgttgccagggattgtcaatgttaatatagaagcttctcttgttgtttgttttggtggttgattgattgtgtatttatctatggtttaggatataataaatgtaggtggtatgttttgtgttcattgctgctgtttttatgatggtgacttgacatgaagattatcggtgttgtgtgtttattaatgatctggaatattggtagatgtatggaaatatattcctgtgataacttgactgattagattgttggtatctttttatttctgttctagaatggtggggaattcttaatacaagccaacactcagaaacgccaaaaacttcaagaagatggcagcacaagtgtttttgaacgtgttgaggttggttttcatgactccatatactctttgctatagttgctgatcaaaaaaaaaaaaaatatactctttgctatagttatagaatagctgcatctcatgttgaaatttgtaaaaacagctactcactggataagttgcttaattttaaaggtctcgcccttatcatctatttctattattctgatgacttcattaacaactagtaagaagtgtactttttgtctcagaaattggtcgtctagttgtttccaacttaaaatattttgcatatcaggttgttactgatgcaaggcaaactagtttggagaccatggagacaaaaattaatgctgatgtgaatagaaagaaacatggccgtggaagagggagttctggttcaggtagaggccgtggttccagagttactgatcagaccaaaacagaaatttctcctccaacagttttggcttcaaatggtcagattgagaatgtatacaaggtatgctccctcccatgaaatatttgttaatggaattgtaatttgtcaattgtccctatcagttttttttctttctaaactggtcttttcaattgtgtttatatatctgtagtcaatacctgattggatgcatagttgcacaaccatgtcttctttaactgtttttaatggagacctgaaatttaaacttcttggcttaaagaattaactgctggaaggaatgattatatccatccatagctgataggaaatttgttgcactgatcttggtgcccgtttttgctgcttggtatttttgaatggttactcaatatcagtgtaatgtcttttaattttttaaatcattctctgtatttggcaaggtctatttgatgttattgtctggttgcgtcttttagctcttggttatgcaaattggaatctttcctgattcctatgaatttctattcataagctcaagaacgttatattgcttaagcaattaattttacagattgatcatttatattgtactccttgattgttccctatagagctcatatttatttgcaggatggcagactcagtgatcagtttcatagtgataattctgcttcattagaggtgcggatttggcctaattccacttgtaaattttatggtcattaaaagaatatgtggctttgtatgaaaataattagaagtttgatattacttttttcatttctacctccctccaacagatcccaatgacattgttgatactttaactatttattgttgtttgtaattttttttaaaaaaatttcattatttcatctctatattcaattaggaggacgttgcatctttacaagcaaaagttgttgcattggaggaggaattgcgtaaatcaaagcaagagaccgctgattatcaaaatctttatcgacagttagaaaaggtatatgtataataataccaaatgctaaactctcaattgtgaatcagaaggatgttttctgaatcttgattttggcatatgcaggaactgaaggagctgaatgatcatgaacagcaaatgaagcctaaggtgtgattattttcagtttttgattgctcggtagttgtaattaaagtttcctttttgaatctatcaaaatatttcactcctcattatgtacatgtttaaaatagatattactggctgtcttaaattttgtttgtttgaattctatatgcaaaagtgaactggaaatcttagacagctccttgttgatacaagtgtgccactgccagggtcccgctcttctaaagtgagcttcttattttagagagtaaaataagcaatatcagtcgttgatattacatgcacatgcatgtgttggaatattaaagtattaaacattgattttctcatcaacgattgatgctactttacctatactcaatttagaagagccctctgctaccactccctcccctcccccaactaaatggttaataagcattctttgtaccatgcatcaattaagcagcagcatattaacatttgatccttctgttttgcagagaatgaaaataatatctgacttactgatatctgtttcaaaggctgagagacaagaagcaaggttgaaagtacggcaagactcattgagacttggaaatgttggtgtaatcaggtatgcatggatcattttaagaaatttcttaaatctcagatagcagagtagctgaccccaaaaccactctagtgggataccagatagtgggatgacttctactgtgaaattttagttacaagttcaataacttatatatagacttatataaattacccaaaattagagacattcatatgctggcaataaagaacagagaactggattaaatcatgaaagacctgtgcaagagtgtttactgcaagaaaatgaaagggcaaaacaatctttaagagagagcagagagcagtgagagagtgaactgaacagagcaaggctggaaacaccaagaaggtgcacctgagagagtgccaaagaatagtgggtcatgtttcagagacacaaggacacaattgttttagaatagggtttcgatttcgaaccccaaataagagaagcaaaatcatgaaatacnnnnnnnnnnnnnnnnnnnnnnnnnnnnnnnnnnnnnnnnnnnnnnnnnnnnnnnnnnnnnnnnnnnnnnnnnnnnnnnnnnnnnnnnnnnnnnnnnnnnnnnnnnnnnnnnnnnnnnnnnnnnnnnnnnnnnnnnnnnnnnnnnnnnnnnnnnnnnnnnnnnnnnnnnnnnnnnnnnnnnnnnnnnnnnnnnnnnnnnnnnnnnnnnnnnnnnnnnnnnnnnnnnnnnnnnnnnnnnnnnnnnnnnnnnnnnnnnnnnnnnnnnnnnnnnnnnnnnnnnnnnnnnnnnnnnnnnnnnnnnnnnnnnnnnnnnnnnnnnnnnnnnnnnnnnnnnnnnnnnnnnnnnnnnnnnnnnnnnnnnnnnnnnnnnnnnnnnnnnnnnnnnnnnnnnnnnnnnnnnnnnnnnnnnnnnnnnnnnnnnnnnnnnnnnnnnnnnnnnnnnnnnnnnnnnnnnnnnnnnnnnnnnnnnnnnnnnnnnnnnnnnnnnnnnnnnnnnnnnnnnnnnnnnnnnnnnnnnnnnnnnnnnnnnnnnnnnnnnnnnnnnnnnnnnnnnnnnnnnnnnnnnnnnnnnnnnccccccacaaaaaaaataaccttaaaaaagttgtggggatacacaatggcttccaaccattaatcaaagttgcgcccactaattccatgaatagccgcaaatgctccacatgtgacagtgatctgcgacaccacaggcttcaacagagcggccagtagctgcgatgcaatgcaactgtgctatagaacacgattgaaaactgagaaattatatttaatatcattttttttaatttcttattagttcaattatgaattgtagagctggaactgtcatatccgagacctgggaagatggtcaagctttaaaggatctgaatgcccagcttgtacgttccatttcctttctcctccatgattttttctttttaatttttgtactggagattattactgattgtgatcgatttatcagattcaacaaggatttattgtgagatttattctgatttaggaattattataacagactatttttaggattctgattctttccttatttaatgtgataaatattatccaaattgattttttcggatttaacatttcatagttcaatataattaaactgtcattatctgaagacattttcatgttttatttgtgcagtgaaataacatgcttttcactatccttcttagattataaatattattaaacctgaacctttttgcttcagttggacagatgactgaatacaattataggatagtagtgtttttggagtttcaagggttttccttctcagtaatatttggttgtagcacagggtatataatgtcaatgttaccataacttctgtctgttagttttttgcaattgaaaccttgcctatgttgatagtttgcatagtgatgtcatgaattacttttcctcatcattctttgtttttccccagaaacaactaatagaaacgaaggaggcaatcgagcggcagcgcaaattatttaagaaaaaacaatctggtaaattctgtttccttttttcttttagcacttatcacctaaaattggggaagaggggttgatgggaccaaatttgggactgtccttttcacttctccattatgccagttgttggtatgaacattccatacatcttgctaaatttctacattgagtactttgtatacattgactttcaatagctttactagatatgtactaatcatgaccaaccatatgctccttaagatggcctaatggatatctggatactatcaatatctgtttcacgctattggatactgctagactatcttgtaatatattactctggtccatgtgttaatagtgtgtgttttgtttttgtttggtccttttctctgattgaagataagagtgatggaacagatgcagaggctggattaccagaagatattctaattcatgatgagatctacaagtctcgattagctagccttaaaagagtaagttgatatttctgctggtccgattgtttctttcctctttatgtttctgatagcaggaaaatgttcaggaagaagaaattattttgcgggagagggaacgatatgaaatagagaaggggaggttaattcgtgaaatgaaacgtatacgggatgaagatggttcacggtttaacaactttcagattctaaatcatcgctatgcccttcttaaccttcttggaaagggaggattcagtgaggtgtacaaggtcagatcagaactatcaaaaagtataataataatcatttgatcatattgatattattttagcaagagaaatgccaacaacatactctagcacacttttataaattatttattatttgctgaaaattattagaactcacaaaattgtgcatcaatatttaacatattcccgctaatgattttaaagtttccaataaatttaactaataaattaataatagaaagtatgttgctagcactcctcttttagcaaatattatacaaggttttgagaaactaaagccagaatctagacaattacttggcctatgttggcaattgtaaataaatacctttttgcagtgatttgaagtaagaaatttccagcaggctttcgacttggtagagcatagatatgttgcatgcaagcttcatggtttaaatgctcaatggagtgaagagaagaagcaaagctacatacgccatgcaattcgggagtataatattcacaagactcttgtacatcgtcatattgttcgtttatgggacatttttgagattgatcaaaacacattctgcaccgttctagagcattgtagtggtatgtactgttgattcaccgttttcttttgatttagtattttagtgtttttccaacccatttgccctttgacactcttttattcttcttctagggaaggatcttgatgctgtcctcaaagcaacacctgtattacctgaaagggaggctaaggtcatcatggttcaaatttttcaaggccttatttacatgaataaaagaacacagaagattatccattatgatttgaagcctggaaatgttctgtttgatgagcttggtgttgccaaagtgactgattttggtcttagtaagatagtggaggatgatgtgggatcccaaggtatggaacttacatcccagggagctggaacatattggtaagtggtaaaaatctttgttggaatccaaaatttgaagtggtccaagtttgtatgattaaagcttcactctcctcaatctgacttaacctttgaagctccttttaatgtttccttgagattccaatatttaatttcgtaaaatatcttatgcattcttcttttcctttttcaatttgcaggtatttacctcctgaatgctttgagctcaacaagacacctcttatatcatcaaaggtcaataaatttctaagttgtaaagacaaggataaatttattttattattgttattgttattattctcactcacaatcactttggtccaaaggatatttcactttgatgcaagtgtcacaatggttgggattgcaaacaactaactcttggatcatcaccttaacatattttgtcatttggctcttgtattttctaacactttgtggaaaacaggttgatgtctggtctgctggaattttgtattatcaaatgctcttcggccgacgtccttttgggcacgaccaaacacaagagagaatacttcgcgaagacacaattattaaggcacgcaaagttgaatttccttctagacctaccatttctaacgaggcaaaggtgagttgcacccttttctgataattgctgctcatggctgattgttctttggccttatttcataattttgtttatttacatttgggtgttgttaatgaaccccctaagtgcattgatcgaggaaccaaaaaataaaaagttttttggaaatcacactgaggtgcactagaaatcatggtagacgtgtattaataatatttttaataaaaactttcctcttttgatttcttagtcagtgcatttgcctttattttattctgattttcagtgatgtacacaactatgctttcttgtaaggttatatttatggtaattttcaaaaaagaactatccaactttattccatatgcaagtgtaggaaggtggttgtttccattaaagacctcaaatatatacatacttatatctggttaatagtttctatgtttagctgtagaaagaaaatagtacctactatctacaatactgtcaaagtcaaacctgacaattgtctgtgctgtatctacaattaatttggtcaggattttattcgacggtgtctaacatataaccaggccaagagaccagatgtattgaccattgctcaagacccatatctcactttctcaaaaaagtaatggcattcatttacatggcttcattatccagactccacggagaaagaatggaggatctcatcttctaacttcagttactgaatctgttaaattttgtataggttgtaaagatttaatcttgtcaatgaggcagagagggggatttccccattctgaaaccgagtccagttaatttacatgcatcaccttttggttcaaaatatgggggagcaaatggcatgtgggtttgatttgacctcaaaaagggtcaggaagtatagttactcactcgcaagtgaaaaagcttgtgttatttttttaatactcttgctcccaaatataggattttaatgcattttgattggctactttatcttcttttttttttttcccaccaagctattaacttgtggagggagatttattttaaggatgtttgaaaggtttgttttacatttggctgccgaaatcgtatatggtgtgttactaacccaaagaaaactaataaatatgtggggggcatcatgaaaagtcagatagcttttttaggatatgatttctgagttaatgaaacgaaatataaaaatatattatgattgaaattagttattggagctgggagcacgcgtgcgacgccatcgcttggttctgggaggcacggcttgtgaaggggttgatggaaggaaaggaggtgaattggtggatggagagtgaacggttgaaagtacttgattagaagaatctggtagaaaggtagttcaaggagtttgagtctgccatggagtatttatccaagtatttaaagagtgtgatgatggatggtgtccgaaacaagtatttcggaagtatatatatatatatatatatatatatatatatatatatatatatatatatatatatatatatatatatatatatatatgtaacccaaaaacatatttcaaaatatctgttctgaaatatgaaacggaacaagtattccataataagttttcaggttgtctatatacttttaaaatagataattcagaaacttatttaggaatacctattccagaatacaattttgatattctaaaataggtattttagaataggttttgggaatatctataactttttgaaatggccatccggtaacaaaggaaggataattggggaatttaaaaacatctgagggtgcaagaagcaaaaaaaatggagtgcaagaaacaattgcctctagagcatgaggcctaatgttcagcaagaacgaatcgcggtaaatatcacagttgataatagttctcattaagacctaacagaaattagaatggaagttgtggtgttatgaataattccttgaagtaacattgagagacaactggatccattaatatcttaatttggatagatttctcgataaacacttaaataaaataaaataaaccaaagtatagtataaaaaaggtcctgcatatattaaggaatagataatataggagatgtaaaattgttttgataaaaaaataaatacatatactaatactataaaagtttttctacggttattaaatgagaaatcataatatacggtatgtttattaatttgataattatttttaattctttgatttattttttaaattcaatttgatcctcttattatttaaaggttcaaataagttctatactttaaaaaacaattcaattaagtctctttttttaaatattcaattagttcctttatttttttaaaacaaaatcaatttaatcccattttttccatctaatccgaaaattttaaaaataagaccaaaattggtgaccaaaacatatatgtttatgttagacaaatacttgtgtacttaatgttgccccaagtttactgcaatatatgcagtcgaatggcaatgggcaaagctgacaactgaaaagatcacctcaatttagttgttaactaccaaattggcaaataatttcatagatattaaccaaacgaagataatcaattgtattttatttatttatttggatctttgttcaagtattcccaaagacataccaatgaaaataattcctcaagtcaggtactaattaggtaaaatttgctctgcgatgacttatgattcaaaacattaccattgcaagtaaaatcctttcagattaagggtataaataggtacatacatatcatcagcaaatctaaattatcaaatccaactcaaaccgtttgaattggataatcaacctattaacctattaatttgtattaaattattattattattaatatatgtaatatataatatatatttttatatttttaaaaaataaaatgttttttaactattaattacatacacttatcgacgtgaattgaataaatattgacgcattcttaaccttcaagatcaaaacaacaataattatattgattaaaatcattttagatagacttctaaaaatattttgaatctatttacaaataatagaccttataatatcccattgattttggtaaaaagacatgtttaaaactcatcttcactatatttattgaaactctttatttcaaatataatatgcttaatttccattcccatacataaataaatagataggaaccactaaaggggaatgaggtgttatatcatcacaatttttttaataaattttttaacaagaaaaagttgtatctgattcttttaataaaaattcaacttataaaaaatactgtttaaaataagaacatacaaaattagatgtgttgacccattgattcatctcaattcaaattgtttacaaacagattggtttggattgagtttcacttttttcttaaaaatgcaacccaaaccaatctatttaaatttaattgggttgaatcatgaatttgaacaaattcaatccaaacggactcacttatacccctaattaagatcataaatatcataatctatttccaccgtgaccaacggctatagggtatccgtaggtaaaaatacgatagccagcaaaatagaacagtataaaattcaacaagcaactaatctcgatacactttccccttccatgtcagcatggattaaaacttgcttttctctccactcaacagaagcagtaaagtcaaggagctcttctaaaaacacctatttgtaactctgcgtgtatatatatatatatatatatatatatatatataaaaaaaaaatggacctaactgcctgtttctgttgccatttttcgtttatgtgacctcttccttttcctacttctcttcactgtgttgtcttcattcgtttcctgcataagaaccgcaattaataaacatctaacaaatatttaggaaacaaagtttattttcagaggattgtaaaattaaataaaatatataacaccgtcgctgaaaaaacataaattttactaaccctaccttcaaaggaccaatattttgtttttcacttttcttcttcttgcatgaaagtgggttcggaccctgcaaagtttaaaagcagtatcatacaaatatgagaattctaaatggaaatcataagctgcaaaaagtaataaagctttactcaagactaatgtcaaatttaagttcacttgtaaattaactaggacatctttctacacaaaatgcatccaaaactgcacacacacacacattacaaagaaattaattgtttgcataaacgtttcaagtctatataaacaattaaccactgaatatggtaaccaaactcaagctaggaaacagatacagcacaagggtaaattataaccttagctctttttctcttgaactgaggtttatccttgatttccatacgattccttgtagtaatacccttctctactgcctgcacatttatggtctgatcttctgaatcctcaatttcctttatttcagtaatggaattgctggcttcctcaccagtcaatctattcattaccctatccttaaatatctggtactccttctgtgtcatgtgcaatcgtccttcttcagaagttttgacatattgccgctgaaatgcagatggagattcaaggaaaagagcatttctaagaccaaatatgagaggcacaccaggtacctgcaataagcagattaagaagaataaatgtgtgtctaagtgtacaattctacacatcttgcatcattatgaaagcacttcaaattttagacataaagaaccagaagttttcatttttttttccttttaatgggaaaagcaccatactcaatcagaaaatgtcaaaaggagtgcataaaggacacatagtaaggtaattcactaatggtacaaataagaacgctggctgtactgaaaaatgaaacacaaccatttaaaattcataatgtaacaaaccagaaatggaaggaacatgggatagacatcaagacatgaagatgttaaagaattttgtattcaaccactctaacaagaaataactactagaaatgctctacacttccatctagccataatcaaccatgagacaagaagctggatggattatccattgaaagctagcagatgcctcaatcagtaacaccaagttggaagataattcacacatttaggcaaggtgatgcaaccacaatgggatgaataggattagaaatgggaagatgatacaactggattagaatatagaaggtgtttacagacaaaatctatatcaatgaatctgtattaaatagaatgaaagatatgaaatgagagtacgaagatgcaaagataatgcagatgcactaaacaagatactgtctccttgtttccccacaattcaaccataacaactattttaaaaaattgctttaattctggtctaaccagaagttccaatattcaaaacgctagactggacaatacccaaattctccaagattgttatttaactgccaattaaataacaagatcatcaattgcactggtatacatcaatcagtaacccatcttccacagatagcaacatcaaattgatgctccatccaaatccaccacgtctcgctaaccaaggttttgagataaatggctttgctcagttaatgagtttcaacaagctttaggtgttataacagaatgaaaagatacctgtaacaactatctttcagagtatcaatataaatctttttttaaataatcataataagtttgctaccaagaacctaatatcaagacaaatgtattctgagtccaaataggtagaagtgattctttcaggctggatatcattaaaaaaatatagtttgttaattaaacaaattttaccacgattacaaagaaaatatcaaagagaaagacatatctaaccattagaatcaacatttaaaatatatatatatatatatatatatatatattatacatatgtaacaaacctcttgcaactttttccgcaggtcagtgtcctgactagcaacaaagaaatgctcagaatttttttctccaacaacctccatgatgcaagcatctgcgctcttacatttttcatgctcacatctgcaaattggagtaaaatcaaggtaatgatcatttccacagcaataccagcgctcaaatatctcaaaaccctaataaacaaacaacaatgatcctgactagtagtccccttaaagactatcagatgctgattattaggactaaaaatacaacattacttcaaattagtgagccttttaacataacatttcgctcaaaatcataaaaaaaaaacattaaaatattcatgtatgaccagttccgtctgaattttaaatatacaaaatacacactgatcaaagagtatcgaactatcaacaataacaagctatgtactctggttctggttatttgatttggcatcattcatgtatatggtattgaaactagtaaagtttaggaaagaatccatttaacagcatatttacccagcagtaaagtgaattaccttgcaactataagtttatgagctgcctcaagagcctcagaatacgagctaccaagtcgtttcaactcagctagaacacatctgcatcatctccacccaaaccccaaattaacaaagagaaataaaaaacaaaaggtatccaaaacaaaacaaatcacaattcatagttcataccaacgatgttgagctaagaaaaaaatgttaataaatctactttaaacatagagagggggaaaaaaaaggacctcgttgtgtacagcttgaccgtagcactgaggacattgccaatggccgtgtcagcaggggttattcgattcacaagaaggtgatgcacaaatgtgccatcacatagaaccttgtaaggcttccgaaaaccgaagcaagcagtgtaaaacgtcaaaatcttcctgtgcctcttctgctttttcaccttcatctgcaacaatgcataacaacacaatctgatgaaaatgcagaaacaggaattagctcggaaatttaatcggcattagaccattcaactttttcataaacgccaatcatataatctgatttcattcagaaccacaaccaccatattgggtaaaataaaatttcacatatgatagattgatcaatgatggagtaaagaggaagagaaattaacattagtttggcatatactttaaaccgtcgaccacagagtcaaggcagagcagctgtgcgcagcggagacttaaggttagggttgccagtgagaaaaggaacgggggacgaagctgtgccgcctgtacgggggtgcgtaagttaaaacttatcccacactttatgctaggttgatttgattccttaaaattatgatattacacagatcaaaaagaacaatgcacacggaataaatacataaattaaagtatatatttttttcttataaatagttttttttatagttttttatattatttgacgaataatatataaataaataaaataaagtatattaaaatatttattaatcatcttaataaaatttatataattattaaaataaagatagagggattaaaataaataagattttatgttttttttttaataattttgttatttaattattgtttttattattaaatagataaaaatagagatattatatttttttaatgttttatatctgtataattttatgaataacaaaatatagatgtttttttctctttaaattagatatttaatttcatcctcatctatatgatttgtgttattttctaatcctttttcaaatcaaatacgaaacacccataattttaatgaatcaaatgaactcttaatgttattttaattaacttaatattaaatattaatatattattttttaccaaaataatatttctatgttgtgttcttatactatatcttaatttaattttatatttattttagtcatcgagtaaatctaaagtttataaagcctaattgactcattaagtgagtggagttaaaaaggcttttttttttttatttaaaccatcttatttagagtccacagtcgtgttatttgcaagatagttaagtcgattcgttttgcaaactctaacaataacggaagatgattttttttcttcagaattcgagagaagagggagaagacacaagcaatgacaaaaaagtgagaagaaattacaacctcatcgtgaaaggcaataatcgacctcaaaatagatttttcagacgaatgtacacatatctcagttagaaaaagggaaaattcatattaatatgaataccattgggcaggtgcagacagaaacaagaaaattggacctttttcccttttgggggcattttttttttatttaccaattgggggcaagttttaaaaaaattctggattggaagcaagtcgtgccacgtagtacgactccttttttatttaaaaaaataaaaattggacgctaatttcggttgctatttccgtcactaacactttgtggcagaatattgtggttctttttgttttttatatttgcgaccacaatattctgtcgcaaaaagtgttagagacgaaggtagcaacaaaaattagcgatcaaactttagcgaccaatttttattttaaaaataaaagagtcgtgacaggtgacatgacttaatcccaatccgaatttttttgaaaacttgccccaattggtaaataaaaaaaaaattcccccttttaggaaaaaaaccaaaaaattgcatatacccacacccgattgaagataaaatgcaccttttgtcgtttcatattctttctcttactcacccacacacaagtaacattttattatgaaaaggaagcatctctgccagaacatgagggaaaacaagtcttcaatcaaaactagctataacacgatcaagttttttcctctcatgccctccattgtaagtgttttttctccaactgaataagccaccaatggtctccaaatataagagaccacaaaagttcatcatattgcccatcataatggccttcaggacctgtcctgaaaattctttgatccgggacgaagtggaaaaaatgggcccctatcacacattttttttgaaatacaaataatattaaaactaagggatgaaaaaaacggacccttaacacataatttttttgaaatacaaataatattaaaactaagagatggaaaaaatgagtccttaacccacaaattttttgaaatacaaataatattaaaactagggatgaaaaaatgagtctctaacacataaaaaatggatccctaacatacaaattttttgaaatacagataatattaaaactaacgaatggaaaaaatggacccctgacacataaattttttgaaatacaaataatattaaaactaaggaatggaaaaaatggcctctaatacacaaattttttgaaatacaaataatattaaaattaagagatggaaaaaatgggccactaacacataaaatagacccctaatataagttttatttttattttatttttttaataaaaaattttacttaaactaccgacccaaaaaattttgggtcctgggcggaggtcctgctggccctgccccagggccggcctgatggccttaaacacatgaaaaaaactaccctaccacttctgaaggcgacgaagcttttttaaaaccccccaataaaattcattatcgcatcaaaggggcattttgagaagatagtcccaaaaattagctttagcagtaggagcagggtgtaacaccccgtagtactccggttgttacttatcttggtactagagttttcagcggaagacttattaaaatccgttttggaaacatcgtattgaaatcgtggttaaacttttccaaaacattttctcaaatacttttcccaacatgttcacataatacgatactgcaaatgctagatttaaaatcctaataaccccaggcataacttaatacagaaactgaatacttcatacataaaaagttcttaagtagtacatacagatatccacccttaagccggtggcacaacaacacacttagtcttaacataggtacgatccatcaacggattgaccgtactacagtagttctaacgtactgaaatacacgcctaaaacgtcacacgcaagtgagaagatattctaatccgaaacaaccgtagctgctgctccatcacacgcccataggagctttgctagaagagagatcttccctactgactcctcctgaaatgatatcccccaagaaaaaggggtgagacaacccgagtctcagtaagctccaggggcttaaagaagcctctaagtccctgaactcactttcaacacaacagtctatatataaaatgaattgtaaccgatagataatgctaacaggtatattgataaatatacaggcaatagaaacattataattacagttataccaacagatatgcaggcgaaaataacaatacaataaggtaagcaattaaactttctctttggtgattcgatgctccgggacttgaacccaaagtcttactctccacccttctcatcttgccctggtttctctgccaaggacttataatctgtcttatcaaaggtgctttgggacttgaacccaaagtcttatcaaacggtgctctgggacttgaacccacagtcttacccaaggtgctctgggacttgaacccaaagtcttcatatcagtgcatacacatataatcccacacagtgaacgtgaatgaggctgcatgcacacacatatagatatatattccattctcatacatcaatacaccatgatgaaacccatggtggacttcaaagaaagagaggctaaagtaagctccagaagcttacctgtaactccaacgtatgctctagtcaagcttttcactggtccacttctctatgtggccctatagtaggaatcaatcacattattacttgtagaataataagtcaagtatcacacaagacttctttcacttatttattcctacctttcttaatcacaagctctttcttgtctttattatcattattatgccaatatgcaagtcaaaactcttatcttcttactcagttaaagttgtataacttttaatataacttaacaatatcaccgctctaatccaatcctagtttttcttggaattcacttaatgatatttgaacaaaatgatgaaataacactgaccaaccccatagaaatgcctaagtgctgcttagaatacaaggatttcaagctgagaatcaatggctattagttattgagcaccaaggccatggggtctatgaataaacaattctatacctgatgtaatcgattaaaacgcgtgcagcttatagtgtaatcgattactttaacataggatctcaaataaaagcttgtgtaatcgattaaaacgatccgtaatcgattaaaccagagaggtgcttctactcattaagcttgtaatcgattacgcttcgtttgtaatcgattaaaacagtcactcagaaatctgaaatttggattacgcctgttttaatcgattaaaccgatgccgtaatcgattacattgttcataattggttttccagaaatgttatgaacgaattaatcgattacttagtgccgtaatcgattaaaccagacgcatgcttgttttctgcaactatatggctttagatctttggttccagttccaaggcttcaattctaaatgatgaaatgcataaaccatgtctatatgaaggtgtttagaatgcaatccaggcttgggtcaccctagggtgttcaatcttttacattgaacccaaaagaaaacttcatttgttgagccatgcatgcagttttataaaagctttaatgaaccaggattacatggcttcaatttctgagatcctttaacaaacagaagtaaggatgaagtaagagacttacttgtgagtttatgcactcctatatgcagaatcaagagaatgaatgaagaacttgaagaccatgcatgttaactcagacagctttctaagtaaggaggaggattactcttggagtcttagggtaggaatgtgcacgactcagaggctgggagatggtataatgtctgtttccttcaatgaataatgaaattaataagactgggtgcagaccataatggggtaggagtcagctttggacagacatggggacttggaaggagatgctgtctcccacaaggcttggcagtttctttgcaggattccctctgagtttgtgtactgcaggttagtggagtgcctggttacttgtgaggcagactcctgattttcgaaatggcatgctcagtggaagcttggttacttgtgaggcagaaaaaaaaactggaattggtgccccaaggtggaagacaaggctgacccaccatgtgttgccttgagtgcaagatttctacagaccatgaggctatagctgatgggttttaaggctgatctaagtgtagaaatcaatgattacttactcagattttacttgcttaatcacagattattcctattccatcaccataatggaccttactagaatctcaatatagttggcacaagattaggtggtgaggttggaataattattctagtggactcttgtaattttagtcttttgttgctttacacttagagccagaatattgtttccttccaattatctagaccataagtctagaattacaaactttaatcatcacttcttatactttatatcatttcaacttataacatttatactaagagttttacttgacttgcttggcataataagacttcttacacttacataatccttacatatttcatttaatctttgtctcaacactttaattgtgagggtcattatattcaccccaccttttaaaagattttgtcctcaaaatctagacatacctgatatcaaaattgggatacaaccggaggatatcatcctctcgctcccacgtggcatcatcagatgttaaaccttcccattggattttaaccattgggatcacacgacttcttaacttcttctcgtctctagccagaaccttagaaggtcctacaataaatttgagatccttcttgacctcaatctcatcaggctgtactatgtgggagctatctgcaatataccttctaagctgactcacgtggaaaacatcgtgaatcttcgccaagttaggcggtaaagctaactgataggctactggtccgactcttctcataatctgatacggaccgatgaatcgggggctcagttttcgcacccctaaagcacgacctacaccagtggtaggtgacaacctgataaaaacgtgatcaccttcaaagaattctactggtctatgcttcttgtcataatagcttttctgtcggctctgagctttcttcaaccgatctctaatcatatcaatatgtttggtggtctcttccactaaatcaggtccaaaaagttgtctctctccgatctcggtccaacaagtaggtgttctacacctacgaccatataatgcctcatacggagccatgcctaagctagcatgataactgttattataagagaactcaaccaatggcaggtacttatcccatgcatttccctgccctaagacacatgctctcaacatatcttctagcgtctgaattgttctctcagtctgaccgtccgtctgcgggtgataagcagtactcaaccttaactgagtaccaaaagcctcatgcagggcttcccaaaatctggacgtgaactttggatcccgatcactgatgatactgtctggaaccccgtgcagctttacaatctctctaacatacaaacgggctagctgctcagtggtgaacgttgttttaactggaagaaaatgagcggacttagtcagtctgtccacgatgacccatatggagtcatatccgccctgagttctaggcaacgctactacaaaatccatggagatgctactccatttccattcgggtatctcaataggctgcaacaaacccgaaggtttctgatgttctatcttcactttctgacagatcagacatttattcacatactcagctacatctcttttcattccaggccaccagaaattttgctttaaatctttgtacatcttagtggctcctgggtgaatggtatacttgcccatgtgagcctccgacaacactgcctcaaccatatcacccttgggtacaatcaatctattcttatagaatttgactcctgaattatcagtggataggaaatcttgctccttcatttgctgtatcacttcgtcatttacttgggcttctctgattctctccaccagtgaatttatcacctcaactgtggccgtcacgtataacgcctcaggtgaagtcacaggaatttttaaatcccggaatttttcaattagctcatattctgagatcatcaaactagcaacgctcatagtctttctactcaatgcatcggctacgacattggctttccctgggtggtactgtagatcaaagtcataatctttcaagaactccatccatcttctttgcctcatatttaactccttctgatcaaagaggtactttaaactcttatgatcactgtacactgtgaaactggccccatataaatagtgacgccatatttttaaggcaaacactactgctgccagctccagatcgtgggtagggtagtttacctcatgtggcttcaattgtctggaagcataggctaccggcttcttttcttgcatcaacacacaccctaagccaaattttgaagcatcacaataaatctcaaattttccctcgggatcagggagaattaacacgggcgcagtagtcaacatccgtttcaactcctggagactcgcttcacactcaggtgtccacacaaatggtgtacccttacgggtcagtcttgtcaatggcaacaccctttttgagaatccttcaatgaagcgccggtaataaccagccaaacccaagaaacttctgatctccgtgacactcttaggcctctcccattctgtaactgcttctattttgctcggatctacacttactccccgggatgagataacgtgacccaagaactgaatctcaggcaaccagaattcacacttagaaggcttagcatatagcttgtattctctcaacgtctgcaacactgttctcaaatgctctgcatgctcttccttactcttggagtagatcaggatgtcgtcgatgaacactactacaaactgatccaagtagggtttaaagatccggttcatataactcatgaacactgctggggcattggtaagtccaaatggaatcactaaatactcatagtgtccatatctggacctaaaggccgttttagaaacatcttcggattttatccggatttgatggtatccagaacgaagatcgatcttagaaaacaccgtggcccccttaagttgatccagcaaatcatcaatgcggggtaatggatacttatttttcactgtgaccttattcaactgtcggtagtcagtgcataatctactagttccatctttcttcttgacaaaaataaccggtgctccccaaggggacacactaggtctgatgaaattctttcgtaacaactcttctatctgctcttttagttctaccagttctaccggtgacattcgatacggagctaacgatatgggtccaacacccggcaacaagtcaatggtgaattcaatctcccgttctgggggaaactgtggaatctcctcaggaaatacatcctcgaactcacacaccaccggaatattatcactgagctcctttgatgctcctatcaacgcatccaataacaaatatccttctcctacttctttcaaagcctttttcatctttgccatggtcaagcacagattatcatctttctccttctgatcagaaaagtatatccttcggctacaacaatcgatcatgactccattcttgactaaccaatccatgcccagaatgatctgcaagctcatacctcctagcattaccagatcgatctcatactcctcgccttcataaataaactttacgcctttacaacatgaatcagtcgagactttgactcctgtggcagttttcactaccataggaggactgaatttgtctatagtcaggtttaaactaacagcaacaaatcctgatataaaggagtgggtagctcctgagtcaaacaaggcatctatgtcatggcctttaatataaatggtaccttttacaagattaggagacctttcagcctccttcggagtaactgcataaactcgggcactcatctgaacaggatactgctctgctggtgtagaagtggaaaccactggggtagccacatcataagtaggaactgcttgaagtggaacagccggaatcggcgcggcctgtaacattgctgcttgccctactttctgcgggcattgacgcgagtaatggcctggttgtccacaactgtagcacccattttgacccactctacaaataccaaagtgtgtcctcccacacttagcgcagggagaaaccttgtctttgccgttcgccatactaccatttctgaagtttcccttattattccccttgaattggttgtcattcctccttgcttgaagcttcttaccttttccttgcccctgaaagttcttgccactaacatttttatttcccatctctctgcctctcgacctgtaatgctcctggatattcagacaatttctgaccagttcagcaaagtccttagtattctgcccggccagtctatcagcatagaaatcattcaagcctttcctgaacctgaacgccttgtcttcagaggtgaggggagtcctaccataactcgaatacttggcaagcttgttaaatttactcagatattcatccaccgacatgcttccttgtctgagatcttcatactcatgcctcttcctctctctggcctcatcgggaaaatatctggtcacgaactgtccttcaaaagttggccaagtgacaacgtgtccctgactctccaacagaagtttggtgttcttccaccagtcggcggcatctccttgtaacatatagactgcatacagtaacttggtggcatcatcggtttccatgacttcaaatatacgctccatctcttggagccactccagtgcagcaatagggtcccttccacctttaaagggaggtggaatatgctttctgaacgcattgtataacctttctcgggcctctctgttcaccaacagtggttctacaggctcacccacatgctcgacgcgaggaccgccactctgatgagctgcttcctctctctcagcatgggcaccagctgtgccctccggttcgttctcctccatcggaaagcctgacggagggggagctctcaattcagctcgcaacagtcggaacatctcaactgtcgccaaacgattctgggccatcatatcctcattagccttcctcatcctctctagatcctgctctctagactcttggagagtctgttgaaaggcagctagtgcagccgcaataggatcggtcggcgcattgtttgctactcgcctgggtctccctcgtggggccatggtactgcacaactacacaaggtatgagttagctacgctcaatcaagtgacagcacctacaataacatggtccgcaagagatacaaacaaacagatattcatgcgcctatcttagaatcttttcctattcctcgctactcgactctatctaattctagactacagcatcatatcagtgaacattccacgaaactgctctgataccatgaaatgtaacaccccgtagtactccggttgttacttatcttggtactagagttttcagcggaagacttattaaaatccgttttggaaacatcgtattgaaatcgtggttaaatttttccaaaacattttctcaaatacttttcccaacatgttcacataatacgatactgcaaatgctagatttaaaatcctaataaccccaggcataacttaatacagaaactgaatacttcatacataaaaagttcttaagtagtacatacagatatccacccttaagccggtggcacaacaacacacttagtcttaacataggtacgatccatcaacggattgaccgtactacagtagttctaacgtactgaaatacacgcctaaaacgtcacacgcaagtgagaagatattctaatccgaaacaaccgtagctgctgctccatcacacgcccataggagctttgctagaagagagatcttccctactgactcctcctgaaatgatatcccccaagaaaaaggggtgagacaacccgagtctcagtaagctccaggggcttaaagaagcctctaagtccctgaactcactttcaacacaacagtctatatataaaatgaattgtaaccgatagataatgctaacaggtatattgataaatatacaggcaatagaaacattataattacagttataccaacagatatgcaggcgaaaataacaatacaataaggtaagcaattaaactttctctttggtgattcgatgctccgggacttgaacccaaagtcttactctccacccttctcatcttgccctggtttctctgccaaggacttataatctgtcttatcaaaggtgctttgggacttgaacccaaagtcttatcaaacggtgctctgggacttgaacccacagtcttacccaaggtgctctgggacttgaacccaaagtcttcatatcagtgcatacacatataatcccacacagtgaacgtgaatgaggctgcatgcacacacatatagatatatattccattctcatacatcaatacaccatgatgaaacccatggtggacttcaaagaaagagaggctaaagtaagctccagaagcttacctgtaactccaacgtatgctctagtcaagcttttcactggtccacttctctatgtggccctatagtaggaatcaatcacattattacttgtagaataataagtcaagtatcacacaagacttctttcacttatttattcctacctttcttaatcacaagctctttcttgtctttattatcattattatgccaatatgcaagtcaaaactcttatcttcttactcagttaaagttgtataacttttaatataacttaacaatatcaccgctctaatccaatcctagtttttcttggaattcacttaatgatatttgaacaaaatgatgaaataacactgaccaaccccatagaaatgcctaagtgctgcttagaatacaaggatttcaagctgagaatcaatggctattagttattgagcaccaaggccatggggtctatgaataaacaattctatacctgatgtaatcgattaaaacgcgtgcagcttatagtgtaatcgattactttaacataggatctcaaataaaagcttgtgtaatcgattaaaacgatccgtaatcgattaaaccagagaggtgcttctactcattaagcttgtaatcgattacgcttcgtttgtaatcgattaaaacagtcactcagaaatctgaaatttggattacgcctgttttaatcgattaaaccgatgccgtaatcgattacattgttcataattggttttccagaaatgttatgaacgaattaatcgattacttagtgccgtaatcgattaaaccagacgcatgcttgttttctgcaactatatggctttagatctttggttccagttccaaggcttcaattctaaatgatgaaatgcataaaccatgtctatatgaaggtgtttagaatgcaatccaggcttgggtcaccctagggtgttcaatcttttacattgaacccaaaagaaaacttcatttgttgagccatgcatgcagttttataaaagctttaatgaaccaggattacatggcttcaatttctgagatcctttaacaaacagaagtaaggatgaagtaagagacttacttgtgagtttatgcactcctatatgcagaatcaagagaatgaatgaagaacttgaagaccatgcatgttaactcagacagctttctaagtaaggaggaggattactcttggagtcttagggtaggaatgtgcacgactcagaggctgggagatggtataatgtctgtttccttcaatgaataatgaaattaataagactgggtgcagaccataatggggtaggagtcagctttggacagacatggggacttggaaggagatgctgtctcccacaaggcttggcagtttctttgcaggattccctctgagtttgtgtactgcaggttagtggagtgcctggttacttgtgaggcagactcctgattttcgaaatggcatgctcagtggaagcttggttacttgtgaggcagaaaaaaaaactggaattggtgccccaaggtggaagacaaggctgacccaccatgtgttgccttgagtgcaagatttctacagaccatgaggctatagctgatgggttttaaggctgatctaagtgtagaaatcaatgattacttactcagattttacttgcttaatcacagattattcctattccatcaccataatggaccttactagaatctcaatatagttggcacaagattaggtggtgaggttggaataattattctagtggactcttgtaattttagtcttttgttgctttacacttagagccagaatattgtttccttccaattatctagaccataagtctagaattacaaactttaatcatcacttcttatactttatatcatttcaacttataacatttatactaagagttttacttgacttgcttggcataataagacttcttacacttacataatccttacatatttcatttaatctttgtctcaacactttaattgtgagggtcattatacaggggaagcacaaaatgttgagcaattccactccacgttaattttttcaaggaaaaagttattattgcttgcagatgttgatcaacgagattaaaagagatctcatataatggtgaaactatccaaatcacactaaaatgtccatttgctttttgagaggaaaatagctctaaaatccaatgcctcccaattattcttaacacaaaaaagggcgtgagtctcgtagaggaaaaacaaatggaattgtatgtaatttaactatgtccttaacatgaccccaagtggtatgacccacggctccattagctcattgaatatgaaaatcttaagaaatatccatagaaacaaataggagaagacgtgggatcacaatcttgaaacccgtagagaaatcaggggtttgagagtattaatatcctacatatgttgtggatctgtatcattattagtaataagatcatcatgtgtcattgtatattgcacatttgaatctgccttcatattctttgtagacgttgcaccattaccgaatttgaaaaaattatttgactttgtgtgtgccttgaatccaacacttaaaatgattggcctttatatgtagtaaaccctttgggagtgggtctttactgattttggtttttctcactcttatatgatgttaattaatgttttttctttgtgttttaggatcccttctcttactgtttgttgggtccattttttttacgttgcacaaatatccagtcaccatcaaagaatccattacaacattaaccatggaattaactctattgttcccttgtgtggtaccgactggtgtaattgcttcctcgactaaggttttcgacgctagttgcctaggaatgtaatgtactcccaccatagaagaggaattagcatcagcagaagaaggtgaaggaggaatttcctatgatgaaactttgcaatctttggagaaatgtacatagcatcaataattataacatattctgtgcaatccttcatattcaatcttgtataagtggcgttgcagtcacacctaccactgaaacaattaagtcaatctctacacaaacataagcaaacctcccacgtataacatcaatagaattaacataaactttaattggctttctcactccaactactagagcaagtaaaatacattcgttacaaaagaaaagatttaaactaggaaaccttactcgaacaatattttccataatttttacttttgatgaaaaagaaaaaaggagaccatgtttcaactgatagataaccatcaaatatcattcatagttcctcctccttcataactttatttctatccatctcctcatcaaacttgatcataaagaaaccatggtcaacgtccatcaaagcaaaaccaacaatcaacttccatacctaagaaagacgatcattcatgggagtaaatccaatactctttcccaatgatttaataattagtgcatcctgccaaggggagcacagtgctataatttttttattttttgaaactcgtggaattttttccctaatgtctagcgcaaaatcaaacactgatgcgtaaaaaaaaaaaaaacagaaaaatctttttctcaaaactttgccgcgtttattgtaatgttcttttttttcattccctccacgtccgctcgaatcaaatggtactaaaatccaccccccgtagcgcacggcttatccttcgcaccccgaaacccattaaacgaaaaacagaacgctccaacttcaactttgctactccattgtcactgaactttctctgaggtactctctagctactcacatcaactcctgtaaattcttcacatgtttctgcttctctttcatcttcgctctgcaatttcttttttccctctcagtgtttttgaaattcgtttgaaaccctaacactatctacgagattggttttacctggatttcctattctcatacttgattctcagcagaaaacgtgaagaaactcttcatatcccgattttgacctagaaatttcatagctatagtgtgttttctggtttgaaatccaaattgccttgtttattagactgtttttgaaactgaaactgcttagggaatccggttttttcatctctgactttgcaatagctaaagtagcttcctctggatatgctcaattgtatttatttttgaatttttgaattctgttgtgatagtaccttgtcttctgttttacaaatacactattgctgaaacttgagatagcatgtacaatactctgtgttgtgtttctaatgcgttcattcgtacggatttttttttttttgctcttataggtacggttatgatactttcaacatgtacatcaagcaggtaattgcactttggagttatttatttaattaatttaatcttgttaatttctgccgtgtcctaaattattagatctggctagattgcgtttatgtattatgattcataaacactttctctctttcaaacaccatataatatgctgttatttcggttttggattttggagttggttctttgccattttttttaatgtacttgttttgtgtgcttttaggttgtgattgaaggttttaagagttatcgagagcaaattgccactgagcctttcagttctaaagttaattgtgttggtaataattttactgaaaagcttttaaatgctttcttatattgatactggaaaatcctttgaaatgcatgcgcgatgtgggcatttcattcatgacatgttatgatggcagctaaacaaagcatgaaattgaggcaatgaagaataagttgtttagtcaatttttatttgaattcagatatatttgcatagactacatatatatattcttgaaaatcctgccattgatctcctaccataacaccaattaactgcaatatctacattctacacatttccatagagtagtaccctacttatcttttcaaaacctttaaatagctatatataggtccatcatctgaactatgtaggatatgcttgctagtctagtaaagattaatggataactaagaaagtgcttcattaagattgtggttctgagtaaaccatatttattaattctattgattattgttattcaaaatccaaatgaaagactttgccttggaacttgaaagtcaccttttcagttccattaatgtccataaaaagaagggttaaggagacagaagaattttactgtgaaactgaaaatcatggtatgatctcatcctgcttgattgctatgctgataggtttgttctcacatcaagctaaaggctgcatacatttttttttggcagatctgcattctttactcactacattgtcttcagtttcattgcttccttttttccttgttttcactctaatgcattcttcctttctcttaattacatttcatttaatgttaagttgtttctaaagatgaatttcaatcgttttgtttagatcaaatgatgaatgcatctgaattgtatttgtttgtaacttcaaatcttcaataataataatatctattcaattatttatttttgcagttggtgctaatggatctggaaagacaaactttttccatggtaagaaatcaccatatcttcttcgtctcaactttatttactgactgccattagtcttcggaagtaactgaaatcatatctctgaccttcaattggtacaccctttcttttgcagccatccgttttgtgttaagtgatctctttcaaaacctacgcggtgaagataggcaggcactactccatgtatggcacagttcatccatttatttatattctggttctcacctataactaatcagttatagaatttgaatatgcttaaataaattattctctgcataggaaggagctggacatcaggttttatctgcgtttgtggagattgtgtttgataattcagacaatcgtatcccggtaatatgttgaggataataatttttcttctattcgctattcactgttattaaaacgaaatgctatttatccttttttgttcattaagtgtattcctaaatggtgacaaaaatgggacttttttggcacttatctttctcaattctcagtgaaaggatagattgtctaaaagctgttatagggcatatgcacatgaattggattctacaaaacagtcaccttttttgccatttttaatctatggtacctttttgactggtcaatggttgaatatttatccattcttgtgcaatgaatgcatattgtgatcacgctgcttacagaaatgagtttgtaggcaaagaaaagaatataatagcagataaattttgtatttaactgaatgaagacttaatatctagatttgtataatgttttttcctcttttcactcaacgtcatttttaagttgtttgttctctatgttggataaacatcttttcattccatttttgaaagtctttggcattgagattctgatggtgcgaattttctgctagctggtaaataatttgattaatgatgaagtgctttgcattgttttgatttcactgaacttctaccatacaatttcaatttttataaaactattttatgccgaaagcaaaatcttgttattggtgcttgttgatgtaattaataattgcatgtcttcataattgatttctttgtactttctttatgacaacaaaattgctttatgtttgaaaatcacttatgcatgaaattcttaactatgcactatctgtgttggtgaataggttgacaaggaggaagtgcgcttgcgccggactataggtttcaaaaaggatgagtattttctagatggaaagcacataacgtgagtgaaatagaattacatgttagagcatatactttgcatttatttttcacttcaaaaaaaatgtcttattttattgtatgctgtttggttgtatgagtatttaccttgatcctaaagatcatgtacaacctgcagaaaaactgaagtgatgaatttgctggagagtgctgggttctcccgatcaaatccttattatgttgtacaacaaggaaaggtattggctgatggtgacagtgcttgaacttggttttggatttattattgttatatttataaactttgaatctaatatgtaaacctgtttcatttttactattgcatagatagcatcactaaccttgatgaaagactctgaacgacttgacttgctgaaggaaataggtggtactagagtttatgaggagagacgtcgtgaaagtttgaaaataatgcatgaaactggcaagtttatgatttatttatttttaagttcatgatttatctagtatttcctatttatttgttattcatttaagttcattatttgtaatctacatataatactaaagttcttctactaaagttacctcatgatattttctctttaagttcttttaatttattacgtcacttataatttatacttgcaagtcttaaaacaaaaataatatttgaaaaatatttatttaatttagtttttataatttttattaataatacttaaaatttgtttatatttgtatacattgagttaaaaagtgctactaaatacttcatcttgatatggatagggttgaaatacaataaattacactatacgggaaattgaatagtgtgctagtcaaaatataaggcatttttgaaaaggaagatgttgtgataaacaagtttttaagaaccctcgtccagtgactgagactggattgtagtcaaatgatgtataaaacttatttttccgtgaaaattttgtgtgcaaagtgtgtcaataatagactttgaaatactttcattagttaaagaagagcagtaaaaatacttcgttttatatttgttcactcaatctggggtacgtccaattttcctttaccaaccagtaaagggtttcactaataaaacttggttacaacaagtattcttttatgtcatttctagcttacaagtattctcgaggtcactattggtacaacccttagactcccactaaatctaagaacatccaagtagcattgttctgtcactaagtcactcctgactttcacaaacaaaagtttggtatagaatcaaagtcttcacaacacttaatcgagtgagtttctaatccctcactagtactttgtatattacaaagaatggactctcttaagctcagtgtatgtctcaacaaatgattttcttttctcttatttcttatttcttgattcatgattattgtttttctatagacgttcgtcaaggttcttcaatccttgatgttgtatttataggtagagagacgctcgtaattatggagagaatttttgggatttatagaacaattggtgacttattggtcataagttcgaatcttgaaacagcctctttgcatatgcaagggtaagactgagacaatatccctcctccttatcttcgcatagcgaggggcctctgggcaatagggtatgtaattttttatattatatagattattagacctgcaatgttatatagagctaaatgttagccaataaaggcaacatgatcataacatatgggtagcagaaatgaggatgttaaggtgaatgtgtgactattcgaagatgaataagataaaaaatgaagaatttcgactaaaggtagcagtagtactggtgagtaaaaagacgagggaacatagatttaggtggtttggacatgtaatgagacgacctttggatgctcccgtaaaaacaaaagtttgttatcaagagcttgacataaagagaggtagaaatagaccgaaacttatctgaagaaaggtagttaaacaagacttaatggagtgagatatagattgacgaacgatgtgtcttaggacggaatggagaaaaactataagattggtggaaggttagatccattgctatctctatgttcaaaatgattcatttttagtcattttactcttcatctccctttttttttcaaccacctcgtatctatctttggatttatctattatcgaccccaattaacttgggttaaaggtgttgttgtggatattgtgtggttttgtctgataggatcaagacttttcatatctgtcattcataactcaatatgaccgttagacatgtaaaaggaaataaaagatagattaataggtatgttccttttaaacaaaatcatataaactggaataaattgataaattgaattaagcattcttatctcaattggtgtttggatggactggacgagtacttcttgcttacagtagacaaggtgtccattaatggataagtcttcaccttgtgttgcttctagttatcaaacctgttgatttacattaaaataaatattttccttaattttaaatttaaaagttgttaaaaatagttttaagtttatgactagatgagattaagaggaaacttattttcgttcaaattcttacttttaaattttctttgtataaaattgaaattataataagttttttatactgaatagtgtgtactgctaataagtctctctctctctctctatcaataagtataaacaaactttataaacttgattttaatactttaactttatttcaaagatttaaatattaatttctccttctaatatttgcttaatattaatttaatcctctaaatatttgtgctatcaactccatccgatcaagcattaaaaggaattaaaaatattttgatttttaataattagataaaataattatttttttggttatttgggagactaatttgatattgtaaattttttaataactaatttaatatcaagtaaatttttaaggtactaaatagtagtttagtattttgtattttataataatctatttactaatatagtaatatgtatattttaaaaaataacttaatattatctttattagtgaatgattaataacatgaaataaaatattttatatttcataaattcatgcatcacatcagtacagattctagtgtttattattcttgttattgatgttgttattgtcatgcatttttctgttagacaggtaataaaagaaagcaaataatccaagttgtacagtatttagatgaaaggttgaaggaactagatgaggagaaggaggaacttagaaaatatcagcagcttgacaagcaaagaaaatccttggaatatgctatttatagcaaagaagttcaagaagctcagcaaaaacttacagaggttatatgtgataaatgtttctctcttctataattatttgcatgatttcctactgtgttttgttagttggatttacttcttgatgattgggtagttagtcacaatcgttttggtgatgatatattcttttggttcttaaccttgctgtgtggttcaaaatcacagctatatcactggagttaagacaatgaaagtttaaataaattcttatgagtacctcacagatgttttcaattaatattctggtttggtttgattcaattgtctgtgatgtgagtgtactcagttttcatgaaaaacttcaaaagctgtataatataatttgttgaaggacaataagaaacaaaatatgccccccttttgcaatttaatagctaattctagaacacatttaaggtgaaacggtcgtttctctttattttcattccgttttagttgatatccaacactgcataaatcagtagaagttttaaacctttttctgtttagaaattgaaattcctcatgtgctgaaccatattactaaatcacgctcaatagtatcactgttgcactgcgttacccaacagctctccagtgtgctaatcccctctttctctcttctgaccgagtctccattggaccccgtggtccatttgtaatcaactcgatacccttaactcctcttttcttgctataaatgtggataaaaggcctgtcatatactcgatgcaattatttggagtttataattgtacactttaatttctttgttgatcaatcataatattgaatgtcaaatatatattgttcagacatttttaatcccattgttgttatatattgggtttgtgatgcatgaagttgaatgcttatcaccttgttttagattgaagatgcgcggaccaaggtttctgacacatcagcgaggaagtataatgatgttcttgatgcacatgagaaatccaaagatttagagaatacattaaaagatgtatcgaaagaacttcaaaactttaacaaagagaaagaggttattgaaaagcgacgaacagtggcattaaagaagcacacagagcttgagcttgatgtcaaagacttgcaagagaagatctctggaaatacccgagccaaagtactaatttgaagaattcatcttatgagttattttgttggaatggttttgtacatggctcatcttttacctacatgctttcaggaagatgctgctagacaactggagatacttgagagagaaattcaagattcaactgctgaactgggcaaaattattcctttacatgaagatcaagttcagaaagaaaaagacattgccaagcagtaggttatggatatacttgtctttcaatatgcttcaattagtgtactgtatctaactctcccagtttatgtattcaaactttctgacatggtggttacgttttttactgcactcttataactggttaatcgtaattttttagtgtttctcatctagctataaatttggattagtcaggatgtaggatagttatatatatatatatatatatatatatatgtatgtatatgttaatctttcacttgtttgtactgtttttgaaatttattctatcatttgttgaggatattcaacagattctaattagtatttctcccacaataaattaattgttagaataatggagcgtgagaagaaactcagtatactttatcaaaaacaaggacgtgcaacccagttttcaagtaaagcttctcgtgataagtggcttcaaaaggagattgatgatcttgaacgagtgcattcttcaaacaaggggcaggcaagtgttcatttatctgtagagctataatgaattatgtcctaaatactctttgaacagattcatggcatgaagatgtctgcttttctttaatcctgtgttccattaattttaaatgtgataactaaatcatctttctactctgttgtaacttgtatatgcattttttttcatgtttttctgcctaccagatcaagtgcgtgtctaactgggagaaatgatcacttacttttgtcaacttcctaaggtagattttggaaaataaaagtgattatttctgggaaaatagtcattcctaaacattcagagtgttattagaaaatagaatgaaagaagtacaatatcagaggatatggtttcccccatcgaagaaacaaaatgtgtgattgccactacaaacaatatcatctaagcttgtcattctcactgcatttcctattagagagctcataaaatattcttgttgtgtgatgtcgagcaacatgatgagaagacagtttttctatcagaattggcacatactctacttttattcaagttggattatttcctttttatacatttcttcattatctatgcttcatttctaattggcttccttccaaatactctagctcaatttggtcttgctgttgatttgtggaagctgctcgtagaagctaaggtttatgctctaatgaataaatggtataatcatatctcaaaaaaatcgtgagaatgttttggtgttagttgttttaatttttaaaagcaaaaggtggaagccagctaacttgtgattttgaagtctacttctcctatgaaaacaaaaaactgctctctaaaagtactaccaatttttaagagtccgtgagaattttacctgacacttgaatttttttgctcgttctttgaataaggagaaacctgttactaaacaatctcggactcagctgaatggaactttctatgctgcttattttaaaatgaactgggttatatttacattttacttgaatcccatatgttcgtaaagacgtagaccttaactattattaagccatatggtactcaacttgttaacattgatatatgagtattctttgagtatagaactttcatgtgatcattgacccttgccatgagttccaatatttgcaaactgttaatctctgtctttgtattctcctgttataggaacgatggtctcttgtactatgctctcttccttgtttttaattgttgttttggtctgcaggagcaaaagcttttggatgaaattgatcggcttaaagaagaactgcaggattgtgatgagaatataaacagacgtaaatcagaaattactgctttggaatctctcattgctcagtcacgtgaagggcttaatcattacaaagaagagagagacaagttacatggggagagaaagtatgtaactcctcttttgtctcttttttttaaaaaagttctatgtagacttttactagatgaaagaagaaatattgttacagtgaagaatgtgtacaccgaaagtgtaggatggggtgccctccttagcaaaagtagaaaggagaaacatagtaaactgcaaaagtatattatttattactttccctggtcaagaaaatatttcttatgagtttaaattgctacattataggtccctatggggcaaagagaatgaacttacagctgaaattgataagctgagagctgaagttgagaaggctgaaaagagtcttgatcatgcaattcctggtgtaagtaatccctctttctaacttctttaacatctccttttgtaaatgccattaaattgtcaagaatcctcaacatggtgtttctaggcaatgaatctttcactatggacggggtagtctgggcatgtttagtttagaattttattgcaacttatattctacctgatgtgaattaacacaaagtgccatcatatttgtaaatttgtgtcactctaaaagaatgtggatgattttgactatggcctttgagcgtttttacatttttctatgctacatatagatgaaggagattgcagaaacactttaattccagaaattgtattacacttaaaatgatagaagatataaaatgattttgttcggtggtggaagtacttttaatttttgaattggtaaatgagttattatatcataaattaaattgagatagttcttaacacatcctgaattggtaaatacattatcatgaataaatttatgataataatattgatatgatagaagatatgataaatatagaaagaacaaaagtttgttacccaaagttcgactcaaagagaggtagaagtagactgaaacttacctggagaaaggtacttaagcaagacttaatggaataagatctagattgacagacggtgtgcttcggatggaatggagtaaagttataagtttggtggagggttagacccgttgttatctctatgttgcatatggtccttttttagttctttcccttttcatttccccccttctttgcttttacttttttttttaacctcctcgtatctatcattcgattcatctactaccgatcccaattagcttgggttagaggtgttgttgatgttgataatcttaataatttattacattacattactaaaagtgatcatttgttaactttattgaatttgattttatatttgctactcatacaattatatgtatattagattgtgtatgagttttgaaaatcatgctggtcaaaatatgttgtttgaataaagagatgatattttttaagtatacaactttacatgttatgaaatattttcattttttcaatacagactgggtcatacaagtcaattagtgattgactgtgtcgattcgtgactcagtgacctagtagtacctagaccgagtcgatgaccagcccaagtttgataacattgggcacaggtacggagagagagttatgatataataataaattaacaaaaaatgaaatttattgaaactagtaccctggtacggcggtaaagttgtgccttggtgacttattggtcatggatttgaatccggaaatagcctctttgcatatgcaagggtaagactacgtacaatatccttccctcttaccttcacatagcaaggaactagacaatttgatacgtagtttattttttagtagagcttttaatttcttttacgttgcactcaagccccaactccctttatgattgcatgatgtgtattgcaagttgtaactgatactacccaacaagtttcatggattgctgcattggaggtgtatgatcgcctgctccacattggacttgaatgtatataaatttgttattgtggaagtttacggtaatattttataattatatttgtaatcttttataaaaaatctttgaatagtattttaattgaattacagttgtatttttaatcaatatttttttgactatttagttgtagttaattataatgttggtaagggtggggattaaaattattatccaaaatagtatgagtcatggatacttagatcttatgctgctgtttatctgttgagtttgagggttaactgccatgatgtttctataatattattatcattcttgggacaggttgtttttatctatcaccatttttgacactattatgatgttcaggatgtgagaagagggttgaattcagttaggaagatctgcagggagtataacatttctggagttcatggtccaattattgagttgctgaattgtgatgaaaagtttttcaccgctgttgaagttactgcagcaaacaggtcatctctctgatatttcttttaatgtattgatttcatctcatgttgcattgagcatttttttatattgttttgggggaggggcaggagaatttggcacatcggttgttccatcttgttatttttagtctttgttcttggcctgatttcattactggttttatatttttacacatttggcttaatgtttttatttaacatcttttgtttgaacagcttatttcatgtggttgttgaaaatgatgacaagtcaacccagataattagacatcttaattcacagaaaggtggtcgagttacatttattccacttaacagagtaaaggctccacgtatcacttatccacagagttcggatgtcatacctcttttaaagaaattgaattttaaacatgactatactcccgcattcagtcaggttagcttctaaacaaatgttatcttttatttcaaatgggtacaacatctttatgtgctatttggtaataaaataattccgaggttttggtctatcagatatcaacttaacatgaaaaattgatgcataatggagaatcatgttaatttataataatcatgctattaaaggattattatttattgggtagggcttattatcatgtttttatcaaaagtttaaaatcttatcttattttagagatctcccctattcttgagaaacaagaaaaccattattcattgcatttatgactcatgtagacctattacgaataagagcctccgctgtgtaaattagacacagaattcatgtttcttgttttctctcttccttaaaagtttctaaactactgtaacacagcacaaggatctagtgggcaggccttattacctatgaacctgcttcaggttgtttgtactgatcctgattttgcttcaattagactcgtctcttcccgtgttatggattctcactagataaacatcctgttgggatatttactagattcatacactccatctatatagggatgaaaatttgaaattgaaggtattactgtgtaacgtgtatatttcaaaacaaggggggagatctgtgttatgttcaaattcaaatttcgcacaggagttcactagaaaattttcaatgtaaacacagtaattaacagagctgtcaatagtggccggagtggccactatcgcagcagagcgacagtgacgtgtgatgtagacttccttcatgttgcgttttagagttgcggttggagtggctgcgatcgtgcttctgactatgaagcccaagtgaaacccgccatgctggatactctgcgacctcccttgtgccgtcgccgaccacccactcttccattttcgttctctaacagggacgattcattttcacagtggcggcatgagctaacaaagaacatggttagtgatgggtcaggtccttagggttttagccttttagggtgttttttcttcttttttctaatctgttgggcctcgggcctcaagtccaacatttctctgccatataatttcacaagggtgggtttttaacttgttatctggtgatctgttatctttgctataatataataaactaaataataataataataataaaaattataatactattaaaaaaagaaaaaactatttagagcatagcacataatataataaacttaataaagcgtaacatatgataataaattaaaaattgcagtaataaaaaacataatcaactaactaataatcgttataaaactaaataaaacataatatataatataataagctaaatactaataataataaattctgaataataataagaagaaatatatattaaataagatggaaattaataatgaggaatcaactatatgtagaaaatggaaaattttaatttatttttaatgttttagtaaataagatgtttgccgttgatgtgatggcgaatctattatgtctttcgttgatgctttagtttgtgcaaaaggtgggctgagtaaattagacttgtgcttatgagatagacaagacatttcagttgaacacctttatagaaaattattttgtgagattcattgaatgggattttcttagaaggtaatgttgttctgcttctttgtttcaagttggaatcttagatttacatttgcatatgctaatgtagtaaaaataatttggtgatagtagattattaaatattaattctttagttgcatttgatgtcccttaacttgtgatatttcataggtctttgctagaacagttatctgcaagaatttggatgtggcttcaagggttgctcgttctgatggtctggactgcataacgctggatggttggcctagttcttttcattgtctgtctacttgatctgggctggtcttgtgtttttccctgacaaattgtttgacttattacaggtgatcaagtaagcaagaaaggcagtatgactggaggattttatgatcatagacgatcaagattgaggtttatgaatatcattaagcagaatgcagacactattcacattagagaggaggaattggagaaagttagatttaatctacaagatatcctttatgttaataaatgaatattctttttttagttttcatttctcttaggcaaaaactcattataaaatgcatataaaacatgaggaaataaaggaaagaaaatccagatgatctgcttgttggaagaaaatagctccaagagtgaggataaaggaaactttagatgtgttcactttttgttatattgcatatttgatatttcttcgattaattgcaactttacccctctaattttactagtgtgctggctaccttttcttgtttctcggggcatattcttgttgatgccttaaaagaatgttttaaacttttaatgagtaaaggtgcattgcttcataaaattgttttattagaaatgtgtcaagttgaagttaaagataatacgatgttctacctaggttttattgaggataaaacttttgtgttatagcatttgattgttccataatactgaagtccagtggttcttttggactctattatcgagggacttcgttattattttttcttgcatttgtttatttattgatgatgattggttttcctttggatgatttatttgctttatcttatgctaaaagtcttgtaagagactcaatttgttattgatctgacaacatgaaatgtcatatatttctctgtttttgtgaatgacttctttgatgcctaagctattcctccaatggttgttttcactgaattagtcttacagatagaccaaaagattaatgaaattgttgctgaacagcagaagattgatgccaaatgtgctcatgacaaatctgtgattgaacagcttaagcaggatattgctaatgctaataagcagaagctgttgatttctaaagcacttacaaaaaaggtgttattgaatttctcacttatacttaattatccccagggagctacttttggttggtagttgcttgtgaagtttttcactacttttttaataccattttccttaattgcttgtaggagaagtctgttggggatgtccagaatcaaattgaacagcttaatgctagtatcgctatgaagaaagctgagatgggcactgagctcattgatcatttaacaccagaggaaaaaaagcttttgtcagatctgaaccctgaaatcaaagaccttaaagagaagcttgttgcttgcaagactgatcgtattgaggttattcaatcaattgtattggtgctcgtaatcttcataaagttggtgttcttattctggcttaaaattttgcagactgaagcacggagagcagagcttgataccaatctaaccactaaccttaggagaaggaaacaagagttggaggctgtaatatcatctgcggatgcagactctttggttgctgatgctgaatcaaaacggcaggaacttaatgatgctaaaatattggtcgatgatgcaacagggcagcttagaagtgagaccttcaaattttcaatcaatctagtcttttatctatatcttgaatatatttccttgtttaaccaaatattcttccccaggtgttactgaaagtataaatgaccgaacacggcaaattaaaaagatcaaagatgaattgaataaattgaaggtaataatgaccttataaattgctcacgggtatatgtattattgctcccaacaatgatgaaagcttttggctgtagtatttggaggacgagtatgaaaggaagcttcaggaagatgcaaaagaattagagcaattgcagagtaaaaaaaatacatatgctgctaaagaagaggaatatgccaagaaaataagggaactggggccattgacatcagatgcttttgaggcgtaagtctttctttcaccattttttttttgtgtgtattagatgaattattttagagggatatgaaaagaaaactgaaagatgctatgaaaagcattaaaggactccacttctattagcaaaggaaaagtgacaattttcttccacattctatttgatattgtcaccttcttaactaagccttgtactcgtcagatattccaaacttctgcaatgatacattttcattgaacacatttgttctcactcctttatcattaaatatggcatggctaactcctgcatccattcagacaaagcatgtgtccaagcatatgaacaggaaaataatcctatctccaacaattttggattgttttgttatttcggttatttttttaaattaatattaggtatttagtcttttttgggggtaaacgtgattactgtgccatgatatgtttgatgatccgccagatatggtgctacagtgtatagcttgcagcattgaaatttatcattttctctgtactttgtttttagctaactttatttaattcctttcctttactcattgcaaatgccaggtatagacgaaggaatattaaagatttgcacaaaatgctgcacaggtgcaacgagcaattgcagcaattcagtcatgtaaacaagaaagcacttgaccagtatataaattttacagaacaacgagaagaacttcagaaaagacaggctgaacttgatgcaggagatgaggtactttgcagggattttcatttggaatgccctctattccccaaagaatcaaaagtctttgaggactacactgcttagcatatattgttagttctgcacttaactatctaaatgttttggtgcaactgatctgtcatggctctgaaagttgctttttatgtgcctctttagtaggtcttgttaaccaatcccctatatgtggaataacctaggaatgcttatgtctgatttgggttcaagcttgattttgcatgttggactgattccaatgcaactaatgtatcctacattgccatctcttttgacttattgtattgaataattacagaaaattaaggaactgatatcagtgctagatcaacggaaggacgagtcaatagaacgcactttcaaaggtgttgctaggcattttcgggaagtattttccgaacttgtgcagggggggcatggtcatctggttatgatgaaaaagaaggtttgtgatcattcttgacttagtgttaggattcaattgcaacgtatgagacttgaagtcccacattggaagcatgtgattctggtgtggggtttataaggccttgggctctccaactacaatagctaacttttgtggtgtggttctcccaaggttcttatcacgtttctattcagttcttttttgaatgagaaaaaatgttcataacttgttatcttggtttcacattttaaaatagttttaagtggacattattttcttaatgttttcatgtcctattgattccattttcttgtttgaatgtggtgcttaattattgctttatttctttgtattttgcttaaaaggtgtaaggaatctccagcaaaaagtttttttagtcattgtaattgatatgaaagtggtatttctgtattttgtatttcctttccctcaggatggtgatcatgatgacgacgaagatgaggatggtcctcgtgaagcaaatcctgaggggagagtagaaaagtacattggagtgaaagtgaaggcaagtgtattctttttatgcctttatttttatttttaattttaatgtaaagtttctgccagaatgctcgagggtttgttaactacacctgttgggatgaggctattgttgtttgtttcggaatgcttgagggtttgttttgtacattaaaagagtcagataatagtatggggtaggagatattttccttcatatctggagatatttttcctttctttcatttctggtttttatttagacttacgtaatgcaaccaatcaaaagcaaaactttatatcatgtaacaacacaaactgcattaaaatagctgtcattcactggttctttactgcagtttccccagcattgcttcaaaaaattagtgatttttatttctactattttacaagtacataacatagcatctaagttctgacatttctggacatttttatggcttgcaggtctcatttactggacaaggggagacacagtccatgaagcagttgtctgggggtcaaaaaactgttgtcgcccttacacttatctttgccatacagcgatgtgatccggctcccttttatctatttgatgagatcgatgcagcgctggatccacagtacagaactgctgttggaagtatcctttttatgcttgctatcatattatgtcaaatgtctggtcttgtgcaattcttccatctctatttactgcacacctcatcttccattaaatgaaattttatcgttcatattggaggtagtagaggtttaggttgatgttatatatggtgagtcttcaatcattgaaaacatacctgctattatgtacctatcacttaatgactcaactcaaaactgtgtggaatggaatgggatgggctgcaatgaaatggattgtttggatatttttatgatgagttgggaaaaaaatgtggttccgtcccatacccctcaaattggaggggaggaaaagtaggcggtattagggacagatggaatgcagtccattagattccatttcattgtatcctatcctatccaaacaatataacctaatattattccattccattatagtccgtacaatctcttttacatctcgtagattattttgaaaacatctaatgttattatatcttatattatccattacttagattatccagtaaggttagttttcccgtcttattctctgtaaacattggtttccacttccttatcccatgatatttttcctatttatttaggattattaatttgattaatatagataagggtttgtgctttaggttttatgaacaatatcatcagttatatttcatatcaagtcaatataatatttagtctctgttctctccgttttggtggtctcaatgagacaaggcttttgttgttgttatggttgtactagtttttggtgagatttaaatttaaaaattaattcatgcttgtgatattctttctgaatgatatatagatttcctattataccattgtcccttttggaattcttgatcttccatagatatgattcgtcgcttggctgacatagcaaacactcaatttattacaacaacattccgcccagagctagtgaaagttgctgataagatatatggagtaacacataaaaacagggtcagccgtgttaatgttgtatccaaggaagatgctctggaatttattgagcatgaccagacgcacaatgctgctgaataaggtcaatgttataatttatatgatactttatggttgtgatgattcctactcgtatttggagtttttccttctcttattaactaacttgggctagtgcaaaattttgcgactctgtagatagaagttaaagtataattgttgcatgcttttcattgagaagttacaagatttttctgagcatcataggtataacttttttaggcaattgtttaaatgacccaatgatcatacacattttctaatgatatacttggtcagttggttataatttttgaagtggtatttttatgtgttgttaggtgcttctgaatcacatggtctgaactgaaattagtcaactctgggactcttcgaagattgtgacgtagagattgcagaacctagttcattcaaattcttcaacctactatttatctgatgtgtagtgactggtgtgatgccaaccgaagtcttggagtaaccaaaaagcttggtcggatatgttttcaaagttgaaaaatgatctagtccccctcattgtacaaatgtaatcactttgtgtagtgttttagatttgttattttccattttatagtttataccaaaaaagtatcatgaggactttatctctttaaatgtaacaatacaacttgactgaaatttatttaggtttaatatggtttttggatatagaagattttagaaaagaaaataaaatctttcagaaaattatatatatatatatatattttaaaaatgttatttatttgcatccttagttaacctatagctgattaataaataaataatttaatttaatcagttaactttttactattaattattgcttatgtaaagatattggtggatatgcgtgaaaatttttcagggtcaagtaaattattggttaaataatatataattaacaaaatttaattaatgtatttctggaacatgcctcacatggctaataaatatttctattagaattttatcataattacgataactagttctaaattcttaatttccaaaagaaataatcattggtttattattcaatagttgtaagttgcaatagttatataagtgaatcgtgattcaatgaaccattttgaatcctagataaaagaactttatatccaaaagaaaataaaaaatataatgaaaattagataacccattgttttgttttagtttaaccttcttttatatttcgacatagaaactagaaatatatttcgtcatgagagaatatagagaacctaagtccatatcaacaaaatatagagatatgcttttaagaatttctcacgtcagttaaaattttcttgagtgtcgcatattataatggacaaattttctaccatgtcacatataataatagacaaattttctctctctcttatcttattgaaatttaattttaaacaataaaaagttaaaatgattaaattttaataaaagatttaataattttgtctaaaataaaataaaatatttaataataaattagcaattttaattaattaaaaattaaatttctctctatctattatttcctgtgtttttttttattaaaaaatagtactagtaccaataatagctaacccaacaatcttccgaaaaggctaagcccaacagcgtaccacaacaccagttaggcgccgtctagccggaagcaccgtatctgtggtgatcgcacgttaaaattcttgaaatctaaaacccttcgttctcttcatttcacaggtatgcttctatacacagacacttaatcttgtctcagtaattatcttccaggcatgatagcccaccacactgacttcattttacgtgtttgataaaatgcctgagttgtgtgaatcgtgtttacgttagctggttctgtgtttttgcgtgcccggaaccagccactgttaccctttggattcaagtttggattttgtgcataggggtcattgggttacttcaattccctccctttttcctccttattggtttcacccgtttgcgttggtaggaactaagaagtctgtttccaattcacccaattttcttatgttaattcaatagtttgagttttcatgcgtattgctatgcacatcatgtgaacatttgtttgtagagtacgaattgctttctaacgtatttttatttattttttgctggtttttattggataaggagatgtttaataatcagtttatacattattttccttttaattatttttaataaactatgcttccttgtgtgttgtgcttattgttgggagcctggcagtggtggcttacatatagggctgatttatttgtgtgttgttttctgagtcttgactagccctttgaagtttgaactgtagcaaaacagtagggaagaaactgaaaattggtataaagtgagatactgagagcactttttgttaattatcgcctgtctatcatgaaataatgtatagtacaacagtgatacttgatattttccttttatgtgggagagaacatatgctttatcttcgtgcaatttttgtgtctttgcttggggtgggcatggttatagagcaatgtctgatgaatgataatagggggtggtgattttcttttacttcacccttggtttgtgatttggtgaaactgtgttttgcagagtagaaagaacaaagaggagaaaatgaacaaggataagatcttcaagctagcaaaggggttcaggggtagagccaagaattgcataaggatagcaagggagagggttgagaaggccttgcaatactcctacagagaccgccgtaacaaaaagagggacatgcgatccctttggatccaaaggatcaatgctggcacccgcattcatggggtatgtcttctaactccttttcttctctcactaatccataatattttcaattcaatacttgaccaagaaattcaatattgctattgttgttttcatcaaactttgattgttgaccaagtttatttggttttctgctgagtaagagcctaaagtatgtttattagaaaataaccagttatttgttttgcgttagtttatgaatttgtgctaacaggaaaccaatcatactctaaaatcttggtgatgcaattgttatgattgtgaaccttgtggtaactctttcatatgcatgtctaacttggcaatgtctccacttgaaagctctcaaagcaaacccatgctttatatatttaaattattgctcctttaaataaggagcatggggaatatatagtcacattgtagttccgttccgatatccaaaggaaaatttctcatatgttgtgatgttacctacaaatctgagattctttgctttagcattgtctggaaactcaggactgacttccccaatcttcagttgggtttagttttctcctattaatgcataatttatttgtgaaatagctttcaatgagttccccctttccccaatcatatcatgtatccggtatcctcaaaactggaaggtccttttgttgcctatcttacaaacgtaagaccaagcaacttctattgttctcttgtcattgctttcagttataagctcagtaggatgtgagcttctaatggtaaatggtagaagtgaatttgtattctttattaagaagcataggagaatgtggatgagcaaaccagtaatttttttatattcagagatggattttgtctgtttgatgtgtgataagagaagaagccatgaaagtgaaaatgagtctttgaagcaaaatagctttcttggaagaaagattggattcttaggtgaactgtgaacatgcacctggattcaagctaactatatttcttgttctaaaatgactatgaactgaatgcatggtgtgtgcgagtgatacactttagcctcaaatggattgaatattaggtgaacctccctctggaatctgtaatttttctcatttatttaacacctctattgttccttttatttttgagtttatattttcatggacatattcttcttccattttctttgtcaataaacttttccttttatttgccaggtcaactatgggaacttcatgcatgggctgatgaaggagaatatccaacttaacagaaaggttctgtcagagatatctatgcatgaaccctatagcttcaagtctttggtagatatatcacgaaatgcatttcccggaaacaagaatgtggtggttcctcctagaaaggtggccttttagagcatgtggcactttagcaaacatttagtggtagtttatgttaaaatcgtgaactatctttgaggaattgggtgtagtacactatatattgctatcaattttgtatgcttgttattcacaaacttgtgtactttgtaactacatgatcttacccctccgctacctctttcaattgctttggtgtcagaaacattgtacaataataaaccttgatcccaactacgatcaattttatggatcattggctgccattagcctctataaaaaaataaagattttttttaatatatgttaaaattgggaagaacagttgtctctgaggttaccaaaccaattagaaagccaagtttataagataaaattgccaaggctccagcgtaaattttatttcaaatagcgtgcttcttttctagttctaaatggagtttctctaacgctttcattacaaaggtacacgtgtaaatcaattgtgagtctcattgtagaaaaggaaccgtgagacctttgggtaatctcattaatggttttagtacttggtggggtttgtagataacccaaatccaaatggaaatagaggatcataatatttatcgccaacattcattgggagctggtcaactgtcttgaaccatgttcttgctaacttgccagtgaatccgtagtcaccaaagagaagatcagttacaccttggccttcagtccctggaagccatgcagccacaagtgcgtctatttttgatagatatggctgaatcacaactggtcggccggtgatgagaactaccacacattgtatagacccacatacattggtgatggagcttggacctggctctggtatagtcaggttcaaactatcaccaaatgtttctgcataagggtgttcacctacaatgactatggcataagagaagttgttggacttgacaaagttggagtcaggattttctttgtagacaactttagtagcaggatcaattgtttgttttacagcatcaaggattgttgtacctgcaaggaaaatggtattttttttttgtcaagtatttgtaagtatcctacaaaaaaaacttatgatcaaatatctcaagttgctgtgtatgagtggttttcatgttaacccatgtaggttttagtgtgtgattagttttcaattggtgcacgttccatagcatgttcaagtgaatccatggacgtggtgtcattggattcaatgtttgtttcatgcttttgaacggaaaaccaaacacacctttatggttcagagttgatgctttttaacatgtaatactaaatagtccctccaatagtatagagtttaagtacccttatatacgcactcctaagccacctgagagatttctacaaagttagttttcagattaattttaaacacaccaaagttaagcatgttggcttaccgactgtgagattattgcccccaagcccctgccaggtaattgtccatcctccacattgataacccaaattgtcagcatgacttcctgccaccagtatttttgcagctttcttgggaaggggaagcagaggcttctcagcagatttaccattctttagcaacacaagtgatttccttacagcttcccttgctaactgtctatgctcctgtttaagacacaataattggtcaataaaataattctttccatttgaaagatatggtcgaaattacatccttgagaaaatatacctcactaccaagttggttcaccaggcttatatcagcatgaggattctcaaataggtccatgacaaattttactcttaagattcttctcacagcatcatcaatcctacttactggaataatattgttctttacttgataagtcaggacatcaatgaattcggtgaaattaaagggaaccatgatctgtaaaataatgaaagtcataaactcataataaatgaaaagtcattacattaaattttagacactcaattcataatatttctttcttttgttaccatatcaattccagcactaacaccaacttgaatagagtacgaatagttagaatgaggaggagaagtaatcctgtcaatgcctagccaatctgatatgacaaaaccctgaaagataccaaaaaataaacctaaggtacatcacaagctgcatgtttactcatcttcaatttgatggaagaccattttctgattttaaaaatagacttaattggcctaaaaagcaaaacttagaaaaccaaaatcgcacataattgaaagaaccaaaagtactcgtcaattgctttattggagaattaatcaaataagttttatttattaccctgaacttcagtttgttcttgaggtaatcagtgacaagaaaatgattagcatgcatcttttggccattccagctagagtaggagaccattactgttgaaacccccttgacaatggagtcatgatatgcaggcatgtgaattcgaagcaatccattataactgacaacagtattgttctcattaatgcccttggttgtgccaccatctcctacatagtgtttagcacaagctgcaaccttgttcctgtgtcaaagtaaataaaatgttgaaggtctatattgtaaccccaaaaaatgtgatttctaatacagcaaaggttaatcagcaacggctaataagataaagaaaaacgcttttacagttctttgttttctgtttctggctagaccatgtatactccaataacatctatacaaattaatataccttgcgctacatattagagacttttgaaattcggggttatggtatcccactcccacaataaggtttgccaataaatcaaatatatattgtccaagtagaaactggtcatgtggcatgtaggtattaataaatatccggagaacattgactttcatcaaactaccaattccagaatgcagaagttcttttcttcattaactgaatatttaggcaagggtatagtgtctttatatttgaaacaatattcaagttttaatattttaaaacttatagaagtaaaagaacaaaatttgtacactgaaatccccgaagaataaaaaaaaggtaaaagattgtataaatacaatgcaatgcttttgcctaaaaaacacaaaaaatataaattgcagtaaatcttttaatagttatcaattataaacaagaagtggacaccaactgaatgactattaccatccaacatatgtgcatggaagtatatataaagtcaaggatgaccaattaatctaatgatttacattgaactcaatagctattttattttaattttgcagtgtaaagttacaacccagaatcttactttccagcgacaaagggaaccccctttctagaattgccactgatgtctccttgcaaaccaggaataatttcagtcattgcttgaacaatcttagggtcttcactatagctttcatagcaacgtccccatctaggatctctgcagacctgtggaagaataaggctattaagtatcaacatagtaggacactagatcaatgttaaacttttatgtcatctagaaaaaataagaatcaacactttcttaattaccgcaatgcatggagcaaacacatattgaattccagtagctctaacttcaagggcagttgcatctccaatcttctttatcagcactggatccctatcagcattatataattatggctatttattcagttaagcagctagatagtgcaaacagataaaaaataataataattcattttaaagatctaaaaagtctcaataataaaatttgacagtccaatttgatttatctcttaatgaaggataattaattgaagggtctagtgataaatcaaatgttagcatattgaaatattcaactgcatataacagcattagcatttgaaaaaccaaggtcttcatattacaagtaaataaaaaaagttaacatgactactatttgagtacatgtatacttgcctggtaactcctagcccaacattgtggggaaaaatggttgccttgtagacattattgtggccatgaactgcatctattccataaatcattggaatcccaaggcgggtagacaaagatccattttggatcccattcaccatttggatccaagtctcagcaggggcctttgtttctggaacactccctcccccactcagcacactccctgcccatcaatcatcacatcacttatatttctttaatatatgtcacctccataatagcaaacactgttatgccccttatgttatacaaatcatacacttggataaggaaaataaaacattactaactattaagcatagtaaactatagcatagcatataaggaaccagtatttggttagagtttggatgagagcaatttaccaatgaagtacttcttcatcacttgaggggtggcaacacttcgttcaatctgcaccatttggcctatcttctcctccagggtcattcgcttcagcaagtccttgattctaacattcagtggctgttttgggtctttgtacttcaagtattctgcttgtgaaacagaaaccaggcagcaaaatagaagaaccaacacaaggggtgttgaaattgcccccatttgaacacttgaaagttgaacctgcatatagtgaaatattttcacaataggcatataatgttaatccctttaattgacatgcatatgaagcaagagaataacatgtcaatctgaatatacatgaaaatggagcatagttaaaggcataaaggaaaggttaccagtattctaggcactgaagtgaagtgaagaagttgaatggagtgtgaggagggagacaataaagggggtttgagagtgaggtatgctaatttaagaaaacttttaaggtggtccaaaattattattatccctactccttaataatctttagttgtttatataatacataattaagtgttattattttttcaaataaattaaaagtaagtatatatgatgtagaaattgatcaagactatatacacagttccaaactatctaattaatgtagaaattaatcaagactatatacatggagagtgagagcagctgtcagtgattggtcccagtacagttacagcctgtgcttctcaactacattcttatatatatatatatatatatgctgacattagttatgtgaatcatatcattacctttcagtattaacgtactaatcataaatagtaaagaaagtttacttttcatgcaatctaactgtaagaatctttactctgttggattgggatatattgtgctgtagttgttaattatgtcttatggtaattgttctttttgtactggtggtactatagcttgtaaaatttgttggtgatgtatttactgctatattctgttgttcgactatttcttgtgaactctaatatgttaataaaatatactttattgactgttataaaaactatcaattaattataaattatgttagatataacttttaagataatttttataaaaactaataaatttgcatgttataattggttggtagtttagaaaatagaaaccttaaaaccttctcattttacaccgtttacatttaaatgagtttaatattgtattatcatttaattataaattatcatttgaattttttaaaataattattttaaaagtcaataaatttattatacatgataggtttagatgattgcttaaattttttctcattcaattaaaacagattttcttttagtttattttattacgttgaagtttctgctcatgacttgctcctagatcctgcatttttatttttccggagtcggtgagtgaagcaaggggggaatttagaacagaaaagctcgtgactttcaaattaaaattcatgggcagcagtacgtacgttcgatcgatactgcatcatctaatacaatggtccgcaggatcgtaatattaaactaactttattttttctcccttagtttgggaaacatttcatatgttgtaattttgattgtatctaacatttttgtctatgcccacatcatgtttgtaagaagttaaaaaaatataaaaaatattgagggttttatattaagtaaaaaatcaattaaaaaaactgtaaaactaacataacaaatgcttaatttaaatttaaagaattaacaatgtaatgaaaccaaaaatttactgaacattttaagttgtttcaaatttattgtgtttgtatccctgttaattgaatacctctttattaagctacagaacatttgcctaaaaattgtgtccactgttagattgtacgctgatagtgacatgtttatatgtcttctcgccattcacaatttttgttggcaaatgttgctttctgtttcagcggggacacaagtcatctcgtgatgtctagcttaataattcatacaaatccgaaacacaagaagagtatgtacttttttaatcaaaagtattgatgtagtcgtataatgttttattgattattgtatttatataagtgaaaataatttatttaatagaaaaatttatgaatcattgataagaaaacatcttgagaatacaaagtatgcaactaaaattttatataaccatttattattctttttatattcatcttaagaaataattttgtattgtcctgactttacaaaccaaacattttccatttatcaaatcaaatttaaagcaacgtgcctttaactttccctcctttattttacgaaacacaagtctatcatcattttatgggacctatcatcatattttatgggacaagggacaacggtgtcctgcatgcacctggcatcttatttaaggaggaaattcatcttgtaaacacgtgtctcttactctatttgacacattgcttatatttcatatcatgcatatgcggcatcatattcaaattaatatgcattaattttatcttgaaaaaaaattagtacttacaaaataacaaattacagtatgaaactttgtcggcagtgtttgtattaagaaactgactatatctttcttataaataatgttcctgaaaaagaaatgataaactatttttaaaaatgtttattgaaatactcttttaaatattattatttataattaagtgaattgtagtaaataatttagaaaaagtcttataagaagaatcaagaagggcatcgaaggtgcaacattttagtgttaaggtgtaatataagaattagaagaattctactttcataatacttttctataataaattttacaattaaagagatacaaaggaaaggaagagataagatccatgacgtgctgaaaaaacacaagactttagattctaaccttgtcgctaacaaaaaaaaaaaagtagatatattaatatcattgttgccaagttactaaactaagtttgttctaaaaaaatcatttaaaaaaacattttaagggccaatcgaaatgctctgcagtcatgaatttttactagcacttatcaattacctagatcttccagagagtattttagaactgcaagaggtgcagtttaattaaaatatatagctgcaaacttcctaatttaatttggttaacaaaaaattatcttataaaaattgaattgctgatatgaatgaattcagccgcacaccaaataaaaaccgtataccaatttttataacgagcaatttcatttcttaaaacggtttggttaataattaaagcatgcttatgtggatgttagagcattcaagcaagatgcaagacacttttaacttagacataactggagaacataactgtccagctagtccttttccttgctgcaaaaactacccagctgaaccagcttgtgtttcttattgtaaacataaaaattttaaaaaaattccactagcatgatcattatgtgaaataaaataaaagaaaaactccacttatttattttaccaaaaggaatgaaaattggatagaataagatcattcttccaacttatttaggatagtgagcaccattatgtccttcccatttcccatttcaagtatctttctacaatgtccagtccacagagttccttgaccacaggcatggttgcagggacccccaactgaaatgttgaatcttcttcatcttggttgctccatgaaagaagctgtttccttgcttcttttacagctgctcttgtggcacagtgaatggaagccgcaagaagtaatggcggctcgccagaagctgcagcaacaaatttcaattttttttttcattttagattttcaaactggaataagtgaagctttctcaatcttattaagagtcttaaataaaaggtttaaatacctttttagttattgcaaattactatttttgtctctaattacaagaacattttcagaaatttttttatccttttttataagatcatttgttaatttttagatgcatttttttcatacttttatttaattattctctcttcaaacattaataaaataattaaatggatagagaaataaaaaatataaaataattaaatggatagagaaataaaaaatataattttgaaatgataatataaataattgataaatttaatatttaatatgattaattaaattaattatttttgttagggatagggaggagggagaactttctaagtttacaaacacgattattttttttaccaaactattatgcagatgaaattgaattaatcattatgtgttccatccacttccatcctcaggcttgatatcgaactgttttttttatttattttaaattttctgttccagaggcattacatgcatctcgtacccaagctcgtatattatttaattagttactttccagtacaaaagatattgttaacaaatatttatgtctttatcatacctagattttgaaattgaactgttagaataaactataatgaatcaatgaaagacagtgcacaaaactacccatttcatgtataagtgaggtgcattcatgagaaaaaaataaataagaccgaccaatttcacaaacaggtttttgataactccttgctcataccttttgaagagagaacacgttgctggtggtgcccactgttgaggacttgaacattaaactgtttaggtatagtgtctatcgtagggattttgtagttccaagtgccgttttgcaacaccaaaccatcaagatttgtttcatattcttcaagcatgaaaaatcctaacccctggacaaaagctccttcaatctgcaggatacaattgtattgttaagaaggataaatattcatactgaaataactgaatagttgtaagtagtaagagaccataaacattctaggacctccaattaggagttgattattgtgttttccacttttactattaaatttaatttttggcatagggaatagtgtgccagttcaatgtccttttttactcccagagggtcttgatgtgagaagttgtgtaaataaaaactatttttggacccaactcttgtgttattccttggtatgggctgagcttgcttagcaaatatgtagttggcttacctgtcctaaatccacagcagggtttagactctgtccacaatcataaataatatctgtttgcaaaaatctggtttctccattcagaagatctatttccacctgagaaataatttccaatatttagaatatcagtataaaaaaagttggctcaaaaacatggtttgtgtgaaaatatacattagcaattaacattcaagagaagtaattatcaaagaactagagaaaataccattttgatttgagatgtgcatataaaacaaaaaataaaaccgacctacctcacttactgcagcaccataattcaggtaactcagagagttaatactgggtgcatacaatgaagatgctgataagttcacagcttgcatgtgtgcctgtacgttaataaattgtcagcaacatggtgattaaatataaatgcttgtgggctaggaaaataagaagaaattctctaccaattccatttgcacatgaaattccctgaatattttcctaattatagtaattatgaaccaataaattgtgagaacgctaattgccagtgtgccatcttccgcactacatactccaagaccttaacaggaaaagcctgaagcaatacatctcatgcacaattacaaatactaataataatgtacatgcatcaatgtgaattgaaaaacacaagtttgtaaacctttcagtggtcagtagtgaaattcaatcataaatagtctgtccacatggatcataaagagagaaaacagttaagttgccacttgcttcatgttatgaagagaactggttttatcttctgggaacttcctcccacaacaatcatgaagataactcttttaagaggaaaatttatcaatgttcaaaattgagctcttttactttatttatagtagctacctgaagaataagggtctcccacttgatagagcccatttcctcctgcagcttttccttaagaggctttagcctctctaccaagatattacagcaaagcctaactgcttcgcagcttgactctgatgtagtgctcccagcagtgaagcctccttgagtcaagctcaccgtatcagattgcacaacccgtactttgtccaaaagaccttcagttccatcacattgaatagcaccgagaccatatgcagccatctgtttcacctttgtccaaagaccttgacccaattcaattcctccaacttcaacaacgacagacccatctaaaaaaatacttacttttccaggagttggtcttagagtcagttgaatcacaactggtactcgagaaattccccttttcttccaggtgttaatcctgttgaactcttgcaccaatttatttctctggtcatagtttgcagaaacagccaacttactccatattgaaggcaaagtatactcataaggttcaccatgatagtactcatagaatgactgaagacttttgtgtgtgtgaagattaacgcttctgacagaatctacatccattaaaagtgtagctgcaacattttctataatagcttcagctataaatgatccctgaacctccccagggcccctcattgcagatctacttggatgatttgttctgcataactttatatcaaaagatagtgcaccccagtcgtactttttaagtgcgtaaactatagcgtttggcataattgcacttacatccacatatattcctgcattgaccaatatctgaagttctagtgcagtaatcttaccatcattcctaaacccaacactgtaagttatcttcatgggatgccttcctccagccattatcatatctgtctttcgatttagatacattctaactgggcgctgtaatttctgtgctgctagtgcacatgatgtggcaacctgcatgatccaatggttagtattatagacagttagacacatgcatgcatatgtaattttcatatataacttatctactactgaatcttttctgcaatcttacaggatgggttagaaaaagggagaagataaagcacattatattttgaagaaagaaggaaataaaaagacagaagtacaaaaccattttattctaattccaggcttgccgttgacaattatatcatgcaacatataatggaaagaagctacttatatggacatttcaagatgatgtgacatgacataagcttcttttataatccactggagtaaacttcttttacagtttcacaaatttgtctaataagagcacatactaatatgtctacagaaatatggtgataagaaaagaaaaaaaattcagattatcggtgatacagaaaatttgaagcttcaccctctacattgaaaaaaaagtgatagagatgagtaatatattagattttcaaaatattaaagcataactaaatacttacagatactgcttttatggcctttccaccaaaaccacccccaacccttcttgtaattacacgaacattattttcaggaattcctaggcatcttgctatagtagaatgcacaaactcagggcattggtttgaggagtagactgtaatgcaattgtcttcatctggaacagcaagtgcagtttgtgtctccatatagaaatagtattgagacccaagtttcaactgcatttaacattgaatttgatagataacaatgaatatttgttcagcataaccaattaaacattaattattcaggagcaaacttaaatattgcatcagaaaccaaggtttacaaaggtatggaatgagaggaagaggggaagcagagtaaataatgtacctcagcagaaagaatcttgtgatccgcttcagccattccttttgatatatcaccaacatgttttggataaagaaaaggaggaacttcaaaaaagctagatctttcaacagcatcttcaacggatagaataggtggttcaagattttcggtatcataatcaacaacagctgagtttgcagccatatctgcaagtttctgagtatctgcgacctaaagaaggtattcggtgactaaaatggtagtatttcacatatcaatctccaaagaaatgaaaaagaagctcatactttattggatcaaaatgagggatataagaactcaccacaaaggctagtcgttcaccaacacatctggctatctcttcagcaaagagaggttcaaccccaaatatactcttagatccaatgttttccccaccattgggaatgtctttacttgaaatgatatccctcaatccatccaattgcaattcaggtgtgagttttatactcctaacccttgctaaaggttttgcactataaatatatgctccatgtaagcaatttgatggtgatggaatgtcatccacaaacacaacctcacctatacatgatgattattcataaatatgtacttgttactgaacaaaaatttaaaaaattaaacatgaaaagttataaatgacaggcaccaaaacaggataaaataaatctcacacacaaaatctagtctatggcctgcagtacaaagtggactttttagcatagttatcttgacaatagttataaggtaaccagagacaagatgcaaaatatggatacgcaattcatcagaaccaagagcaaggggaacaagttttttatgaacataggggttttgacttctgctatgtagcaattggttataaaatgctactaaatgaatataccaacatggtgtgacatggttggtttttaagcatgtggtcaggtgtttgatccctggtccatgtatatggaaaaacatctgttgggagaggttagacccttaaatggatctacgtacctcgagggattagtccttggctctctgccgagggataccccggattcaaccaaaaaaaataccaaactgctccaaagcaagagatcactgttgggtactgaacaatcaagataggagaaagtgagaaagggaagaagaaaacaacatgcagaatttatcctggttcacccaatgtgagctacgtccagctattcactatatttcctcacacacttgtacaattgcactcagattacaaggaaatatataggcttagaaaccctaagcatcgtagctattcatgggctcaagcccaaactacaaataataaaacacgaggccaacaacagtactaggcctctagccccctagccccagccggggagactctcctgggcccccgtgcatatctactgacgacacaatttgagccatacctaacaatcacaggaagggaaaagggggaaggcttttagagaggcaaaaatctgacacatttactagcttgttgctacaagcttctaaggagaaagagagacatatttttatgaacctgacaaagagattgatgtcacatattcagtggaagtgaataatgatgggcagtccaacacacaattctgcaagcattgtaggatctagagagggtaaaatgtatacaactgtataccaccagatcacaagcttacaaccctaaaattgcacaaggactcactttctagcaaatggaatataatacaaaaaattaccaacttttttcatgtaaatatttaagtttagtactttgaaacaattatagaaatgcaaagacagaaggcagtcaatcaattcaaaactcaatgatacaaaacaaacctgaagcttgtagtgcagctccagatttcatgattggctcaccaacaggatgatagtcacagcctgcttcaaggatttgcttaccagatgacagtaaagttggaactttgtcatgacgaacctgcttctgattctcttttaactcaaaatccttagcataaggaagattaatatgtccatttaaataaccattgtttattgcggaagcgtcaagaagtgggttaaagaactgaaaaataaaagcagctgccaaacttgaacggtaagtggtttttgaggtatcatctttaggtacaatagtggctgtaaccaagatgacagcatcgtatagaatgctagcacttaaaagctttccagctaaaaactcctcaacattttttgctctgattgcatgcttactcccataagcaccaaaagacaacctacacgtgtcaatcatagttccaccagaatccttgcattgagacaccttaaccaggaaagcagaatttaagtaagaaagggcatttccaaggggtcgaggagaagctcggtaagtttcaaagaggaatctacttcttggttctgatgattcacttatattgagttccaaactaggaattttaatgctcaaaagcacactttccaaacctaatggcggtctttcgagaaattcctctaatgttagccactcaaattgtataccagtcattatgtgaaccattgcatctacagcaagaagtattgtagcaatatctgagggaaaattattcttctgtgccataactaaatttccacctacactggctgtgttccgaatatatcctgaggcaactttgctcatatggtcagcaatcttttcaagtatcatcacataatctgaaagaaagtcacttctgctctcttccttcagtgcttcaatagctttagatattgtcactgctgctccaatttcaatccctgtttgatcctttctgatctttgaaagctcagaaattccccttagatcaatgtacttatcataggcttccttttctttgtaatatcccatacctgtattactaacaacaatttttatccgggttccattatcatggtttaatttcaataagctctgaagctccattagactaataggtctgtgccaactgtgtttctcagaagccaagaacacatcatgtttgatttccttcaaaaacaaaggaaatctactattcattttattacggtcatattgaggcaacctactaacctttaagtccttgctgtctccctttctccagaaagagttgaaccccaaatcctccatatcaacatcagctgcaaagcttttgcagacatcagcaatcggtcgatacccagtacagcgacaaagattccctgcaattgccttttcagcctcagcaacagttacttttgagaacccagcaggtggctctggacaagtaatcttttcagcattgacaagagttccaaagagggaaacacacattccaggagtacaaaagccacattgagtggcatggaatcctgaaaatctttcatgtattgggtggaatccttctttagaatttccaatgccttcactagttgttattgaacagccatgtatgctgcaaagtagtgtgagacaagagcttgctgtaaaatcctcaacttggtcaagcacaggatcgtatttggagattaaaactacacaagcgccacaaccccctgaaaccaaccaaccatgtctaaacatgaagtaccaagttggaaaaataaaataaaaattggactactaaaacacctccttcatcttcatgatttgagcatcagaaaaataagatgaattcccccgcctaaatatatagggtgcagatcaaattattccaagaaaaacacttggcagagttactccattcaataattctctctctctctctcaacgattcattagattaaaagttttcattgaatagcttaaatttacaatttcttatagtttcaaaattatttagtacttttatccacgcatactgtttagccaaaattcaaccaacttagttagattctttatgattgaaatgatattaaaatgtttatgggttgcattgcggaaatttaatatatacaaaaagttatggagaacattaacactatcaagagttacttttggaagaacttatcatatataaatgaaaatgaaaattattgatatagctcaagaataatatgaaccggtacagtacatgttttttttttttacagaagtacagtacatgtttttttgtttgtttgacagaagtacattacatgcttatgatcagcctaatcaatatactgacttataattcttccattgtatctgcttcttaaaagggccagaaaaggggtattggacaatttaaagtgacggtaagcataaagggagtacaactaagtgtaaaaactgaagcagcaccctacaaggtcacaacagctttgaactaacccgtttgacctggaactggaaaatcatcccaagaccatcaaaatttattcaggatttcaccaagtggaaccacaattaatcttacagagaaggaaggagaaagaaaatgaatctatatcgtaaataccaagcttattgaaataggaaatacaaaaaaagataaatggttgaacacaaacttatagtatataccttcaccacaaccgagcttgacactcttgaaacgagtacgagtgcgtaagaattggagcaaagtggttgaagggtcaacgtggcagagctcaaacctctcaccattaacaccaaaaaccaaacttgttggtttggtggtgtcttctccagttccatagttcagcaagtgttatttcgatcagtttttatcagcaacagaagaaaactttaaactctcataattaatgtgtgcgagtcggcgttccttactgttctcgatcgacgtgggcacaatgttaattttttcaaaacgcatgtggaattggtatcataatttctaattcattctgtgactgtcacctcaaccactgtcacctcaaccagctaattcaacaaatactttattgattccttagttactctatatatgcactttctcacccacctttccatgctgctccatgcaaatgttaattttttttatcaataaatattaatttattaaaatattaattttatctgaagaacagagaagatcaaattcgacaacctttttcttattttttaatcatccaactcactttaaatttctaaacaaaaaatgtattaggacttgaatcctcttccctaaaaatctttcctccatctctctaatgataggggtgactttatctatttctaactagtatttttttattcattatctctttatttcttgttaaaaaattgtctttgacttttttagctgtagactgcagtgtagtgtgaaaggtccgttttgatattggaagagatagaaaatgacaaaagataagataaggattgagaagatggacttgtggttgtaagttttaacgaagaaggcaaaaccaaagagccaggcacaaaactcaacgagaaaatagcgattagtgcgcagggcccaggcaggtaagagaagaaaaactgtgttagacatgaaaatcagtgatgtgaaggtagcaatataatgatatcactgattataatgattaattaaaaatataatttctttttcacaaaataagtgttgtctttcattattttatataaattaagaaaaattaatagataaataaaaataaatattaattttataaaattaaatttattaaatgaatgaatgagaatattattaatattagattaaaaattaaaataatatttattaggaatattagtacaaaataagtgatggaaagatagcaatagtatgactgaccattgattataatatacttctttcgtcacaaaataaatgtagtttaatattattttacataaattaagaaaaattaataaatagataaaagagagtaataattttataaaattaatcttattaaatagatgaaaaagaatagtattgagacatctatggacaaaattataaaaaaaataagatacacatcaatgttttaagagtttaatttttatacatttgtcaatcaattacaaatcatgatatgcatgacttttaaagagattattgttaaaagtcaacaaatttatcacatataataatttatagtagaataacactataaaagttatttacagtatcaatgaatataatatttactcatgtttaaaatatagattctacatggtgaataagagtcttccacttgacaatccattttcgacaaatttaaataaataatatttttttaataaataattcaaaataagggattgtttttaaaataatttgaaatatggaattgtcaaatacgcccaatttaggtgtgactttcgtcgctaattcggtcgctaaatgtttccgaccacgaattccgactcaaaatgtttaagcgactgaaacagagactgaaattagcatacgactttaaaatcaattttttaatttacactaatttttttcaatttttgaaattagttttttaatttttttaaaactgaaatcgtttaaaaatttatagtataattttggtaaataaatatacaaaaaaaattaccttatttgggttatttggcaaaaaaagaatgtgtataaaataatatatatatatatatatatatatatatataattacgaacactttggtaagtttattttaaaaaaaactctcatttctcattttctgctcatatgtagaggaaacctaaaacaatggtagtcctatttgtaaaacctattatctcctctgtctaacctaaaccttaatatataaatctagttcttaaatagataggagaaaaatagagaatgtgaaagggaaaaatacgatcaaactcatccctttaatttttaacttttgttttctttttaggatttaatgttctttgtctctcttatttttgctttgactaaacaaatacacactactctaatctcaaaccaataccgataaccactacaaattaaggtggagcttcatttaagtattttttttatttttatttccaaagaaaataaaaaataagagtaaaaattatttacttaaaatttagaaaacattttttcaaaaaatatttttaaaaagaggtacaaaactgaaaacaacaaatctaaaaaataatttatatatatatatatatatatatatatatattggattaaaatacctcttatgctccttaataaaatttctatttattgataaaagaaatcaataagagaccaaagaaagagatgtcgtcatcttaatgtgggacaaaactttcatacattaacatgatactattgttggtttgatttgcaaacaaaatttgtaatacattttaaattggcttgtaacgcatggataaatttcgagttcgagtgaatttcgagcgtataaactgcaaacggtcataactttttatagaaatgtccgatggagacgtacgatatgtaaaaacgcttgaaattcagataagtaattaaaaaaataaagaataacattaaattaactaattaaataattaaaaaagtaaacaaaaaagaaatttttggatgattgaattctaaatcctaattttgaagcacttagaggcattttttgaaaaaaatagttgaccaaatttccttcggtaattttcctaggccttcctctctcaatttcgagctctttgacataaatcacgcctcaatcggacattcctatcaaaagttatgaccgtttgaagtttatgtacactacgagtcaaaatgacatgtaccacaaccatgtgaaatacgcctaaattttataaaataatatattcttacttgaaatgattttattaaaatattcttacttttaatatatgcatattatttataagttacaactattggatgattaatcgtggtggataaaaaattgataagcacggtactaaaacaaattatcatattgatatgattttatttaggatggaatcgaaataaaaaaaaaaattaatctcatcaaaaattaaaaacttcgttcaatatgaaattcttttggaatactaaaacatcagtcatcttgaattgaaaagaataaattgttggcataattccaggggcggattataacaaatactgaaaataattaacaagcaatacaaacaagtgctaaggatatattaaaattttaatgacaaaatttaaggggaacagaatataacatgcactgaaaataattaacaagtaccgtaaataagtgttcatggtatattaaaattttaatgacaaaatttaagaggggacactgtcccccaacttataagctagatccacctctgctgacaaggtcgtaactaccctataagacgcaagttaattttcattgcttcttttataaaaaatttaaaataagaacattttcgtttttttaacttggaatttaaggggggcacttgcccccttctctagtacgtgcatctggctctgcataatactctgtggagtaaatcatttttaaggagtagattagtcctctttaattgcactaatcatttaaaaaggattgtttaatttcatttgataatccaatttaatttgttttgataatcaagatcggtcatggatgaggccgaaaagaaacttcacgtaacaaaggctatatatagccgaatatctcatccatccatcatatatatattctctttcctcactggttattatataatgataaatttaacagttaatccaatgttggtcggacaaaataattaaggtggagcgaaaccaagctagatagcttgtgtagcagtcgtgttttgaaaatttaactgaacagtttaatcaaaaaatagaaattggtggattgatgaagtgtttagtccaaataaaccacataatcattagtctggaaaaaatcggttaaagttaaacaataggaaagcagaaattaaattaaagctagtcaaaatgggaaaannnnnnnnnnnnnnnnnnnnnnnnnnnnnnnnnnnnnnnnnnnnnnnnnnnnnnnnnnnnnnnnnnnnnnnnnnnnnnnnnnnnnnnnnnnnnnnnnnnnnnnnnnnnnnnnnnnnnnnnnnnnnnnnnnnnnnnnnnnnnnnnnnnnnnnnnnnnnnnnnnnnnnnnnnnnnnnnnnnnnnnnnnnnnnnnnnnnnnnnnnnnnnnnnnnnnnnnnnnnnnnnnnnnnnnnnnnnnnnnnnnnnnnnnnnnnnnnnnnnnnnnnnnnnnnnnnnnnnnnnnnnnnnnnnnnnnnnnnnnnnnnnnnnnnnnnnnnnnnnnnnnnnnnnnnnnnnnnnnnnnnnnnnnnnnnnnnnnnnnnnnnnnnnnnnnnnnnnnnnnnnnnnnnnnnnnnnnnnnnnnnnnnnnnnnnnnnnnnnnnnnnnnnnnnnnnnnnnnnnnnnnnnnnnnnnnnnnnnnnnnnnnnnnnnnnnnnnnnnnnnnnnnnnnnnnnnnnnnnnnnnnnnnnnnnnnnnnnnnnnnnnnnnnnnnnnnnnnnnnnnnnnnnnnnnnnnnnnnnnnnnnnnnnnnnnnnnnnnnnnnnnnnnnnnnnnnnnnnnnnnnnnnnnnnnnnnnnnnnnnnnnnnnnnnnnnnnnnnnnnnnnnnnnnnnnnnnnnnnnnnnnnnnnnnnnnnnnnnnnnnnnnnnnnnnnnnnnnnnnnnnnnnnnnnnnnnnnnnnnnnnnnnnnnnnnnnnnnnnnnnnnnnnnnnnnnnnnnnnnnnnnnnnnnnnnnnnnnnnnnnnnnnnnnnnnnnnnnnnnnnnnnnnnntgttgattaattaactttgaaaagaactaaatttcacattttttttcaaaattgagttctaaacaaaatctattatatataattccaattcttttcttcctttcgaaatttaattatagaaagatactagaaagaaaataataaataaaaacaataagatgcttttttattgagtattttttatcattgagaaaacaaagataaactacaaaccaataaatacactcctcgtagcatcaaccatgagacaagatagcatgtgaattggacaagaatccataatctctgtattaggtgttgatagtatagatcgcccacaaatttaaatttaaattgatctaaatcaatttaagttggattggataatttttatatttgggtaaaacttgaactaaatcaattaaattattattataaatatatacaatataattggttcaaatatgttacagaaagatggtagtagaacatatattttgactttaaatttgtttcaaaatattataattttagttgaaatttcaattacattactcatttcactatttgagaacattaaaattttcaaactttgatgaaatagttatagtttgttttaagctttctggaattttcaaactttgatgaaatagttatagtttgttttaagctttgtgggtgtgatggttatttattatatttcaatttttaaatcatatttaaaataatatgttagtctaatgtgatgatgatgacaaattgacaataatgtgattctcctttatttttttcttcactatttgactataagtaacaattataagtaatatattacgatatttcatttaataaaaaatttagcctataaaaaatattgcattaaaaaaaagaatccaatcaaagtcgaattgtttacaaatgaattgatttaagttggatttcatttttttccttgaaaaattgactcaaatcaacccgttcatatttaattagattaagtcacgagttttatcaaattaatctaaaccaacccgagtacactcatattattcacactcacttgtcccgctcacgtgtttccttctctataagtgtgttgaaacttcaactcctccctaggataaggcatgaaggatcttatgctatttatgagagttgcatgatcgtggaagggaggagaaccttgcttgatgagcgtgatccatgttagagaatctgattccacaatgaaatgtctatgatttaagttccaagcacgctgaagtccatgataaatgcctaagtgtttcgcatgaatattcgttgtgtcaccacaagatatgtagaaacataccttgaatccattgcccgagtttccaataatactcactaatatgatttgttgaacaacttattagtataaatcttttctatatttatttctcagttacacaacaaccaccaaaaccctaaggacccgtattactgaaagagctgtcatctgtatttaatttgaagaaaggtgaggtaggaatacaccatgtttttgtatcgacggttttactaagaaccgtcttagaaagtgaggttacaaagacgcactactagaaaaaagactttttacatcggttattttggacttttaacatcggttttgaaccgatgttgaaactaccgacgttgaaagtatcaatattaacatcggtttttgaaaaccgatgttaacataactacacaacatcggttattgttaaaaaccgatgttgtttaataagaaattaacaaaaaaaaatgtaaaatatgcaaaaaatcaacatcggtttttagaacaaccgatgtaaaaatgacacattctacatcggttatagacacaaccgatgtagagatggccttttccacatctgcttacaactgacgttgtatagtccttttctaaatcgtttattacataaccgatttagaatttccttttttgaaaataaatgtagcctattctttttattttcctccttgtaatattaaaaaaacgtattaaaagcttaaacaaaatttttaagacacttctattaacaattaatataaatactcatacaatcatatatcaaaaaaaaatatttgtccctttttcatatatattctgcaatgaaaaaaaaagaagataactttaaataaagagaacaagaaagatatataagaacaaaaaaagttagtataggtgtgtccacattaatacatagtcaatatggtgggcaggtcatattatttccaacactttggtcatgatatatttatttacaagactcaatctcaattataaaaacaatcatatcaatactcacttaaaattgttgtcctttcatgtgttatttatttataacttttttgaagctttagtaattaagtactttaatgactaatcacagttaattatatgtgttcaatttttttttgaagttttagtaattaagtactttagcaattaattaattatttattttacattaatgttttttttaaatatccttgtcaaatacatacaaaatagttccagtgtctacacaaccaattcaaataaattataataccatattcggataaattacgactacctttatgactttggtgtacttactcccatgttgcatgttatcttcctccaccaatatattcctcgtgcattcttaccctgtccattaaataagtggccttataaggtagttgttatgaaataaacttgtctaacaataaactttgttaatttcttcttcaaaggaaagatttataatttaaaactcaagatttcttattaaattaattagaataatgtcatattagttgagtcacatatttagtggtagactaaaaagttaaatgaattaaataatactaatcatttatactaaaaaagttgaatcacacacacgtgtatatatatatatatatatatatatattccaactaattttaacttgtaattaagctacatataatgaagaattaaactcttttcaaattaaaacttattatctaattcaagacttatggcatttacatggattcaatgtccataataccttgatgtctcttcttgaatgtgtaaaaaagttcatccctaatgacaaaatctgaaaattgattgcatcagaatatatacaaaagtacaattatgacgcaggacaaagtgacaagcaagaggactactcaaatctcaatagtacataagattcttaaaaaagctatatgttgagttcctagcttcctcaacccaattatcaagatcagaactcctcaccaatctactatgccgcaagagccaatggagcatactgacaaaccaactgcaccacatgtatagcggatccaattttgagttattttccttggatttttatgtttgatgacctgaaacatattacaaccataaaattgaaatttaaaattttactgatattacttaacaaaccaatcaattggaatcggagtgattgatattctaagattctgagtggggatgcactgactgtaaagccttttatataaagtccaattccataaaaataatgggaaatcaaaacaaattgaattttgagaaatggcaagcatgacaagtcaaaaggcccaaatgccaaaactatagcataaaattaaagataatagcagaagcaagtaaatggtagagagcactagagttaaacaatgcaaatttaacacattggtaggaaaagagcactagagttaccagcagactgtcataggtcacagaggcaatgcataagtcacttcattattacatgatagcaatatgcaaacaagagatagaacatagaagaaatttcagcaacatcagaatatattcacacaatcatattagtgccacttgccaccatgtctcataaaaaataatgtttttagagtgactgaattacttattataaatttgaaatattataatatttcatacgaataaaaacaggatgcttaaaaatatatcatacgaatatatgggatgagaaaacaatcttaaaagtattttaagaatgcttcaagtttcaactaaaatgtatatatttattttttctacataacatttactttttttagtaatttttttatcaataataatcaaaatttgtgtaaaaaaaatctagatagactactcaaacaacttaattagattccacagttttattttattttttggttctagaggcttccattactcattcatataatattattaagtactactaactactaagagaattagagtactgcatttaatagtcattcatataatattagaaacattcatataacagggtgtaacattcaggatattaaaaggtgccacacgtaattggctacaattttgctacaattcaggatatctagtgggacccgaaatattgctacaatttttggtctcttaagccaactatgagactatttctcagtccagagtttagtcacttaaactctttgccatctacaataacaataacttaaagcttcttttttattttaataggaataacttaaagtttatgacaagattaaagctcaaagcttcatataatttgcagccatattattttaagcataaacaacttatttaaaactatcaattctaagatgaaacatcctatatcgttaaataattattaaatagccttatacactataaatttcatttcattataagataaaatgaatggtggaagtttaaacttcaaagtacctgatgtccatgagaaagatgtccacatgaggaagatcaagttccatgattctttcatgaggtttaagcaatgcagtgtaaacatggaaatttgcaggagaccttgacagaggctgcacgttcactgcaattaaggggtaacagcgacatatcagaacacttaaacaaacacataatacttttaatgaatctattgaacatcaagaaattataattcattggaataacaacatgctggtaattcaataaaaccatttcaactttgagccatcaatatgttaaaatccaaacttgaacccccaaaaatctaacctaaaggcaacgcaatttttgtcctgagggaaccattctcaagtaacagtaacatgattttgaataggtcgtgtgacataccctgacatcttttcttgttgatttcaaaagacacaatcttcttctttcctgcaaaccaaaaataacaaaacagatcagagattttatcttcgcaagcatacatgacagagtgaatgagagagaaagggaagaccttgttggaaagcaaacggcaaaaaatcccttggtctaagcttctaatatgaaaaacgcagaaaaaatggaaatttatgagtggaaaagaacacaaatttatatgagtgaaaaattatatgctaaccttcagatttttagtgccgctgctgcgagatcgacagtgagaaagtgactgagagagtcgcaacggggagagcgagagagttgccgccgggaaagtaagaggccgagaaagcgaggaagagcgagggaagagttagagtaaaagtttcagaaaaaaaaggttctagggttttataaaagacatgtaaatttaaaattccacgacatcagttttcttccaaaaaccgatgttagtgatttttattttttgatggtaacatcggttttttaaaaaccgatgtagaatgtcttacaataacatcgatttttaataaaaccgatgtcgaatgtcttccagtaacatcggttttcataaaaccgatgttaacaacatccttttatttacaaaaatgccaccgcgttttcgttaacatcggttttataaaaaaccgatgttaaattggcgatgttaaaaggtttttttttagtagtgacggttttataaccgtctttgaaagtgattattttcgaagacactcaatacaaagacggttgtacaaccgtctttgtatggattgtagaaccgtttttgaaagacgcttttgtagtagtgcacacaacctcttttgggattcctttgtttacatttagggagaaaacttcttgtgtagacttccatagcgacatgatttggttgagggagaacaaatctgtccaatcatcatcctggaaaatcttattttattgagtattattattattctttcttaaaatatttcctttacttatgaaatcaatcttgcacttgacgacttacacttaaattattaataacgattcaattattatcattgttaacagattaaatataccaatttactaaatgattaacaatcatagttaaccaatcaacatgttaaccaataatgaacttatataaattgttcacacttcaaagtgtatgttgtcttctttataaagttttaaagatatagaaataacatactatatatatgtaaccatttcttttgaagaagtcgcgcggttacttaaaatatagtatttaaaaaaaaatcaaatctttctttaataaaagaagaaaaaatccttaacttttgtccaatcaatatttgtagtcaggaatcacgtggaggttttagcttcgccaaaacacaaagttacctcctctatgagaccaaagcatataattattcgtgaatcagcaccctaataacagagacacaatgtttgcacgaaaagaaagtaataaagcaaaaagagaaattaacaggaactagaatttgcgtgcaaaatgcataatatataagctcccatcaatgtgcatataaatgcacactgccagagctttcattctccaacaacggagacaacaagagaagtcaaaagcaaaagatcaacaagtaaaagtaactatggcacaggcacaatcagcagctaattttgattaccaagattttgatccctttttcgaatggtctgaagacgaaggaagtgtcacgctcattgtaatgcttccaggtaattatcttctttaattttaccctatatatatatccgtgaaaattaacctatagtaatactccatttaattattatataagcaaacaactgccttctattgtatgtgtcaactcagtgatctaattcgtataattcataaatttaatttttttgagaaaaaatcattcatgaaccctagaataaatattatatatatatatatattgtaaatagtttacatttgttattcaatatatattaagtttgttaatttttaaaacaaatgtatataaaatagattatgcactgataatataaaataattttaaattatcatttaatcataatttatcatatataataaattttataaattttacaataattcttttaaaagtcatatatcaattatcatttataattgtataacattataaaattattataaattatcaatgtataattattaaattcaaatcatatatcttaaaattcatactaatgcatgctaatttaaactttaaatcatatagtattttatttttcggattaaaaataatcatactttctcacaactaaggtcacattcacattttgttttatgtttatcaacacttcaaatttctctctttcaatcacatcataaactttattgtatttataattttttatttttaagtctctctctatatgtaaaatagtatgatggatgttcatcaaacatttttcatacatatatactttgaacatgaacaggattcacaaaggaacaactaagggttcaagtaacttcaactcctgtgctaaggatcaatggtgaacgacagatcgttgagaacaagcggcgtcgtttttctagagaattccccattcccccatattgtgacaccaatgatgtgagtgctaagtttgagggtggcatcctaagcatcaagtttcaaaagctcatcacccctgctgctaggtcactgccacaggaagctccaacaatgcctcagaaagaaaaagaaccatcacaacaacaagatcaggttcataagcaagagtcactacagaaagagaaagaaccaataactagtgatgagaaagaagagaacaaaacagaagagtcgtcaccacagaaagggaatgagccaattagtgatgatgacaaagaaaaggataacaaaacagaagaagtggttgctgaaaagaaggtgaggactaatggggtgccagagacagcaaaagaattaggaacaacaacaacaacctcatctaaaccaaagataacccagagactgaaaacaagggttttagatttcactgtgagtttgagatcagtagaagaccgggatgttgttaagcaagggtttggtggtaacaagtgtgcaaagctaattaagaggccaaagatatggatgaacatttttgtggtcatcttattggttatggtgctggggttgtatgtcaaaaatgctgcattcatgtcatctcataagggaggatcagaacttcaggaattcaaggaattttaattattcccatatatatatgcgtaatattcatgcatgtcaacgcatgattgaattcaatcaaggaataaaacaactggtctgatcattgaacaattggattcaaaataatagaccagttttccccatgtaattctttctttctttttgagaaaatttgaaaagaaaaaaaaaacacaatggtttatttgaataaaaattgtttaaattcttcatcagagtaatcagtactgcaatttactggcataacattaacagatgcaaaggatttgactcctacgactacttacatcagagtaatcacccttattattattttcacagttacttctatcacctttaatattttactaccattgttattatcaataccttggagatactctattttacgtattagtttagtcgaatattttcaaataacatttttataaattaaaaaaaaagtgtcctaaataaaataaaatttattcttcctctatatccacacactagttaaaatatttattaattttgtatgaataatctattatttgtgtttatgattttatttttattatattttattaatataaaatatactctatataaaaaaaatattatttaatattaagacgtatcggaaacatattaaaatattagtatttttgaagtaacgtattaacgtcccgtgtcgagaagtatcgaaaatgtggtgtcggtatcgatgcttcataggctgctaccaaagttttaaaacatgaatctttaatataatgaatatttaatctcttgaagaaaaatgtcttacattggaatacttttttatcatttttatttaatctatttataattaatgattttaattccttaattttttcaagtaaattaaatcattaattctatttttaaaattaagtgaatttaatcctacatgcatgttatcacttttcttttgtctaaaatctcattttataattaaaaatcttcacaaacagaatcaattatgttgttttaaatttttttctctccaaagtccaccaactaaaacattaaactttgacaaagataatctatcttttctctcttttacatcgtgtaaaacatttctgaatttcattaatttctaacttttaaaattttaaaatcatgtgatattctaaatttatcgtacaatcttaaatattttaatataaatataataattaaagactaatacaattatagtataactctaagaaaagaaaagactaaaaactaataatgtagttaacccatttttttatcttgtgaaacactgatatagaaattagaaagtgagacatggagacacgaattacacgagcgaattgaaaacctccgaatcagctaatagtatatcgagagatggaaaaaagctgtaattttttatttgtcggttaaagatttgcactcggaacaaatttttgcttttgggttttagcatcaccaaagaacggggtcacctcctctcgttactaaagcatattatttttcttgcgccacacaaactaatagtgtttgaacgtacgaaaagaaactaagaaagcaaacaaaatgctactacattttgcgtgcaaaatggtcctaattgcctcatcaatgatgagtataaaaagaagccctagaagcaattcaataccaagaagcaaatatacatcaaacgcaaaagcaaaagagaaacaaatcaaggataaaatcaaatgggttcaaggacacagccagcagcatctgatcgtgtctacgaagactttgtaccattgtatgaatgggatagaaatgaaagggttgtcaatgttatgctaccaggtaaatgttttttcaagttttcaaatctaacctagaggaataatatcaacttaattattagttcattgttataagttataacataagcaacagataaagaaattagttttgttttcatatatttttgtctttataggtaacgttcatcgtcaatctggtttttatatagaaaatactcaatttattctatatgtgtataaatatttccgaatttgctcaccttaattatttgttagtcgaacaatagaataaaattgatagagttattttttttcctacaaatgttagtttattattttttttctttcaaaatatcaattgaaaaatttgaatccacaatttctctctttcttttcttttcgttattatttaaccattaaatcaatcttatataactaattaatagagttgtttcagttaaaaatattgagaattatcacatctgaggatgaaaaaaaatagaggttgcattaatttactctaaataatgaattataatcagttactatccaaaatcatgatatcatcatgcatgatatatacatcttttttgcaatgaattaatctcaaactttttttaaaacatcatatcaacctaaaacttatgagaatatcttattatttcactgaaaagtcgtaaatctaataactgtggttaccaaaagaaataaagcctcttttgctattttcgtctaactttatgtatttgcaaaatcaaaaaagaaatacgcttcatctgctttcaatattattatcaccatatacaggttttagaagggatcaattgaaggttcaagtgacctcaaagcccaccctaaggctaatgggtgaacgactgatcactaacaacagatggcgtcgtttcaatctagaattgcctcttctttctgattatgacaccgacagtgtgactgccaagtttgagggtgctaagctatcaatcaaatttggagaactttcactgactaagcccaaggaaacattaacaacttccccatcacaaaaatttgaacagcaaaagccaacccaagaaggtaaagcagaagaagcaaagaccaatggtgaagtctatgatcgaaagacaccacagaataaggaggaaaccaacaaaactgaaacaaaaggtgctctggaagcaaagactgatgaaggctcaagtaaaacaaaagaagcaccaactcctactgctcctaagactaagcctgtttcaagaagcaaaacaaggctaatagatttcagcctcggttctggatcaaatcatgttgatggtgaagtcattgaagatttggaggcagggaagaacaagtgcaagaaattggtgaaatggatggtgataatctacttggttgtggcccttgtgggacttggggtttactatggcaaaaatgcattgacatcataccctgaagaatcatacttccaagagctgtgagattttcgccctcaagtactgctacttgtacaagtaaagagaagaacactttattcatttgcgtgtaaatgcatgaattcaataaaagaataaagtaaaaaatgtttgaggtttcacaactataatttgagctcattgagtcattgtatccgttgtatttctaatacattcatctacaattaaatgactcaaattctgcagtataatttcccgtagtgttgcttataaaatctatctaaagattcaggagcaaaggaagatgcaaatgaatggagatttatagagtatcctaaagctattgatgaaatgaaaaaaatatcaatcgtattaaaaaaaattgacacttatttttttcttaacacttcataattattgtccttaaaatagctactgtgtctaacacaaatgtggacatgatagtgatctttcaaaaatagtcttttaaatagtcaatttatcacatacaacaatgaaaaactctaccaagtctaatcctaatcctctgttaattaaataagaaaagcaatattcccaatataaaaatatagctacaaaattcaaaattattaaatgctcaatagatgggtccaacaatactagtacattcttagaaggataatgctcaccgactgaaaaccctctatatctctcaagaaaaacatatacaaagagaatgaaattgatgactacttcaaaactgcataaactccaattctgactaccttacattctttctaagtatattcttcagttagagacttaaaacaattatctcttcttcattcatactacattcacaagaaaataattatattttttttctctctttaaaatgcttgtgaagcctaaagaaatttttattttaaaaaatgatcgagttcaagtcaaaaaacttgcgaaaaaaaaaatacttcgaaagtggagattagaaatattctatctctcaattatagtaatagaaattgtctgtcaaggactcgatttatatttgaattgtggggtgaaacaatataaaattattgttttaatctttttctcccttacatctgtttatccgtttttctaatcaaaggagagattaatttgttcaaatttattttttttgaaaaaagagattttcttaaaaattattttcactgtgtcattggtcttaagacaatattctttcatcccagactaacctttctttgcatagatttgtttttcttcaaggtcttttttttaataaaatcatgtgatcaatcaaattgcttttataaagattacaaaacaaaattcaattctccttctggtgttttttatttgtcttttacatcatcttacagtttaattaggattttcacccttcacagttttacttttatgataaaatataaagataaacttttcgagcattgaatgataactgcactattccgtacgtattcctcgaatttgaacacgggggcaaaatgttgaaggcaaagccgagaagaaaatatactaattaacttcacttgcaacaggaacaagagacatcagagtcaacaccagtggctagcatataactctgttcccacacatctgcaggaactgcttcggcatgaggaacgtgacgaggatgtttttctctcttgtctcccctgagctgcttcagaccacgcttaagtgctggcaataaagcttccatacactcagcaacagcatttgggtttccatgcatgttaatgatctgaatttcaacaaatcaaggaccataaagcaatttagtaacaaaagtaatttcaatcttaaagattaaagctactgtaaaattggcgttctcaattcccgataacagtgccaaaaacttgttgcgaaacggcaaatgcacctttcgtttcaaataataaagtgagtaagtagagtatcgtctccacagggattgagatacaaattttatcgcaacttattatcttaagattggaagataatatttatgaaaagaatatgattgaattttagaattacgaaaattaaataactgaatagaaaattaacgagaattcaaaaagaagttttaattaaatgttacgcagtattgagaaataattgtggtcagagcacctctacttctgatccctatcttctatatacaaattggtgattgatttcaattgttataattgctcagaggatgtatttgatataatttagttaaatcataatcccttagtaatttaaccctttaacccaattagaaatcttaattccttagtaattctttattaagttaagcattaggaaaatacatcaattattctataattgtccatccctatccctaagtaatgtaacaattatcaattattattctaccgctatcagaaatcagagttccaacatccctattgtaaaccctaacccttagaaccctaatagagtgatcaattctattgaagcgaaggcaatataagcgcaagatagaataaaacaatcataacattaatctcaataccaatttaatacagaggagttcacatcagttttttgctctaaccacaataaggaaaattagccagacatgctcataactaaccttcattgcaaaactaacatgtatctaagagagaattataagaaatagaagaattataagctgctccgtcttccttcaatcttctctttgcgtttatccttgtgtttctgtgtttttccactgtccaaaagtgtcttttatttatttttccacgtccatatagttaattaggtcactaaaccctttctggcgttctatttccatgccaaatcacttaaatctggaagttgcgtgtttttggcgctactagcgtgaacctggcgctattggcgtggctcttcagaggaaaataaggcttctctgattaatggcgctaacagcgtgggatatcatgctaatagcgtgagatcacagtggagaacaggtccttcaagcagctggtgccaatagcgtgaagctggcgcgactaacgtgggcaggcagagagcacttgttacctcctgttgcttcttttcctctctttttgattcctaaacaacaaagtatgaataaaataggtaataaaccaagaattgatgacacttacctcattctatcctatattaataatttatgattgaattattgatcaatttaacctaaaaactattgtatgctagcagcatatcagctgcttcagaccatgcttaagtgctggcaataaagcttccatacactcagcaacagcatttgggtttccatgcatgttaatgatctgaatttcaacaaatcaaggaccataacttagccgataaatacaagtctagaagaaagacagattacatatccggatctaggttgtactagttacaacaataaatgcaagattttccttaactactcatgatacagccccaatgcagcaccattttagagccaagggcacttgtataccataagtaaatggatgaaacttaagtaactagtaataaaaacaaattatcaaataaaagaagctttggaatctatatgatttgagttttctgaaaatagtaactgtttaactaaaagaatcatgctgtaaccatgaagattgaatacaataggtaccttcaaactcaaataactaaaatctagcaacagtacaagacatggacgttttatccctcctaatattctttttgataaaccagcagagttttaatcatacgaaatgtgttggtaatataatcaattttcttgttttcttattatttctaaaagaacacttgttatttcttgtcatcaccctcggttaattaatttatgactaaaaagactttctaactgttttaacaaaccattttttctgccatccaataacagataattactttctcattggttgttactgataggatattgtacaagtgggagaataagatattttcctagaacagcccataaaaagaaaaagagaaccacgcaaaaccatcaaagaacattttaacaataaaatcaaccattgttaaaaaaaatggggcatagccacttccttgcatggtgatttgggtaaattttggtaaagagtttcaaacttctcaacttattcattaggcagtgcacaaacagctaattgagaaagacagagaatgaagaataaataagacaacaaaaaatgtataatcctattacagcataaaatactataaaactataaaccccatgtgttatacaaaggatgcgtgaaaaatcaataatatgaagcctcagccagatacaatgtacataagtttctgcagtcaacagaacactcaacactactacactacaacagagcaatgcccaaaacagagtttttatcttccaaacacttcaacaatgagactgttgcaaaacactcagtacatccaatgccccttttggcatcgactaatatcaagttcgctttttagtttagcatcaaacttgtgacctctttcaaacaatgattcaaagaggtgtatctagatgccattcagcattatccaactaggaagatgatttaccaataatgcaacattggctaatttgactatttcaacacatacgaatcctgttgcagatgagcatagctaaatctagctttagtggtaacaaatgccacattgctcggttcctttagtatccacagaaaaattttctttggtttggaagagtatactagatgcactcgattaacaacaaaaattcctatttaactttggaggccaagcaagaaaaaacatgatgaatatgaccaatacctcattaaccttgtctagagtattgttagtaccagtttcaggaagtaaaaaaaaaaaggtgcagtgtggagtttctgcttctgcaagatttcattagtagaagctgctttatctagaaagtacaaaaactacttaagtcttaaacattccacacaaattgatcaaataccagaaaaatcaattaaagtgctcccgtcattcaaaacagaaatccaaataggctaaaaaaatgctttaatcctgattttcaactctatgtatgtctccttgtttgcattcaccagtatataatataaaatgaagaccaataccttcgatctgggccagcacccgtagcaactgtatcactaactgtaagaatagccactctgacttcagcatcccctgaagaatcagtagttactttatgtgatttaattccaggcaaagcaaaggctgagtctgatgacttatgattctcatcacatgccatgggtcttaggtcacaaattatgatagattacacagcggtccctgcagaaactacactgcctgttgctggaaactccaacaaggcattagctgacttcatactaagtagtcggctgctcacttgatgaccagtgctcacagcaaaaaaactgcaattcgtggacaggataaaaaattcattcattaaagagaccagatcaaattagcaacagtgctcggccctccgcataatacccacctcttcctccccacaaaaaaaaaatgaaaagacatgcaaaagaacaaaacaagaacaaaacaattcgtcgtcaacttaccctggattgcatgttccatcattgtcagcccatataacagaagcacgatgatattctggctaactggatctgtctttgtgagttgacaaagccgagcttgtgccctgcatacaaaagaaactaaatgaatcaaaaccataaaaagcaaactatcttaaaaacaattgtactttggaaatttacgtaacctcaaatgctggtattaaagtagaaaaataaaaagagagatgtagaattgtctaagattttttacatattcagtatgtttatcatttttaaagaaattaaattaaaaaaaaaaacatttttgacagacaaattatcacaaattgtaatatcacgaagaataagaaagattaaaaaagtgacttttaaaaaatttgaggaaccagtaaattaaattaaaaaaacattttgacagtgagaaattattaaaaattgtgatatcattaacaccaataataagaaggactaaaagtgacttttaaaaaatttgaggaaccagtaaaaataaattcttttttaaaaaactaaaacaataattatctaaagttaaaggacaaaaacatatttaagttaaataaataacatttcctctcggatgaacctatccataaaccttaaaaaaaaataagaaaatgaaatcaacttgtctcgtaaactaaaattgatttatgtaattgatttatacagaaaaatcctcgtctaatttctctaaaaactataatgcgtaagttgattttaaacatcacggagaagtttatcctcaatgaaagtggaatggggaaaatgagaagtggaaaagcgaaactctggttgttacgtgagcgacagttccagggtagagagtgatgccgagagcgtcatctcctgctcttgattcggcaacgacgggatactcgccggggccatcggcggcgacaacggcgtaactttccttgacggaggccgggtacggcgggagagggtcgggagcgcggacgtcttgcgccaagaccttggcaagggcttggggaaggggaacagtgagtgggagaagacgtttagaggggccgtgtcacgtgtgagttgtgacagtctactcaatgtataagttgaactttaatccaataatatttaggataaataattattttcttttctaatggtgtaaaatactgataaaatttgtaaaataaaaatttaaatttttatttagtgaaaaagaatttgaaaaatttatctctttattaatttttatttgttattattaatatttatgaataaatttctaaatgtattacatattcataaacaaatttatgagttctttatctaaaatataatttaatcttcatattctcttttttttaatcattataaatataacattataataaatatttaaaaataaataaaataaatataacttaaaataaacataataataagtataatattaattaataaacattatttgtttgttattctcaaatttttattataacaacattagataataacaaaatcaaattaaatttcattttttatgtaagaattaacttaatgactatatatttttgtttgaggtgaaacttaatgaaaattaaaataaacatattttgtaatgactaaaacaannnnnnnnnnnnnnnnnnnnnnnnnnnnnnnnnnnnnnnnnnnnnnnnnnnnnnnnnnnnnnnnnnnnnnnnnnnnnnnnnnnnnnnnnnnnnnnnnnnnnnnnnnnnnnnnnnnnnnnnnnnnnnnnnnnnnnnnnnnnnnnnnnnnnnnnnnnnnnnnnnnnnnnnnnnnnnnnnnnnnnnnnnnnnnnnnnnnnnnnnnnnnnnnnnnnnnnnnnnnnnnnnnnnnnnnnnnnnnnnnnnnnnnnnnnnnnnnnnnnnnnnnnnnnnnnnnnnnnnnnnnnnnnnnnnnnnnnnnnnnnnnnnnnnnnnnnnnnnnnnnnnnnnnnnnnnnnnnnnnnnnnnnnnnnnnnnnnnnnnnnnnnnnnnnnnnnnnnnnnnnnnnnnnnnnnnnnnnnnnnnnnnnnnnnnnnnnnnnnnnnnnnnnnnnnnnnnnnnnnnnnnnnnnnnnnnnnnnnnnnnnnnnnnnnnnnnnnnnnnnnnnnnnnnnnnnnnnnnnnnnnnnnnnnnnnnnnnnnnnnnnnnnnnnnnnnnnnnnnnnnnnnnnnnnnnnnnnnnnnnnnnnnnnnnnnnnnnnnnnnnnnnnnnnnnnnnnnnnnnnnnnnnnnnnnnnnnnnnnnnnnnnnnnnnnnnnnnnnnnnnnnnnnnnnnnnnnnnnnnnnnnnnnnnnnnnnnnnnnnnnnnnnnnnnnnnnnnnnnnnnnnnnnnnnngatgaaattgtcaaattttctacacatttaaagattaaatcaaatattttctatattttttctctcaatgttaatcttcttgtcaactaccgacttgaatgaataacattcgcaatcggtaatttgctacattaccaacaagtctgatgtggtagagactcgtgattttcttataaactatgttttaatctaaatatgtttgtgattttataaagttgaagggtgaaattaaaaaaaaaatcatcaatctatggattttaaaactaccgagaatttattacattcatttcctcacaagacagtttttattctttgaaacacattgtggaacacaattatttttagataacataaaaaaaagaagaacggaagacacaattttttaaatatatatttttattattaattaaaatttattaaaattataaaattatatgagtatatatgatattcaatgaatatctcttatgatattgtaattttctataaatataaatgaataaaacaattatatttgaaagaatatatctaacttgtaagtaaaataacatgaatttcattcttttaatctaatttttaatttatcaaaagaaaaattaatttcttacataataaattgatattttctttcctctgtttcaaaataatttgcattctaaatggatcaacccaactcaagatttttttataaaagattaataattttataaaattaaccatccataacacttctccagctccacgttagtataccgcacaaacattctagaaaatttccaattcagggggcagcaatgatattccccaccccctgacgtcaacgttacctgaaaaccgtgacgcaccccgtggcgtcgtctttattccgttctccgcccaacgcaccacctctcctttctcctctccccaaaatttaaaataaaaatttcaaattccaaatacctcagattcgcaaaaatcccttctccgtcgccacatcgcatgaaccttgaattccgatttggataggcatgtctggagcggcgttatcgccgccgacgagttcgaagtcggtgatgcagacggtgaacggttcgcacaagttcgtgatcgaggggtattcgctggcgaaagggatgggagtggggaagcacattgcgagcgacgtgttcacggtgggaggttaccactgggcgatctacttctaccccgacggcaagaatcccgaggacaattccgcctacgtctccgtcttcatcgccttggccagcgaaggcaccgacgtcagggcgctcttcgagctcactctccttgaccagagcggccaggggaagcacaagcttcatagccatttcgatcgctccctcgagaccggtccctacacgctcaagtacaagggaagcatgtggtacgctttcaccatgctctgctgccaataacctttctttatctgttttggtgccttcatgttttttttttttatcttgattgtgcctctatgttttgaatgtttgtagtttaaagttttaatgatcattagaccgtggtttttcaataatataaagagaaaggacaaaatttagatgcagttcgataggtgcttttggtgtttttctcctattacaattgaagtttcactctgggaatcctgcattggcatttagtggaaacctttattagacgaattaccgaagtgaaacttcaatttcttattggaggacaacaccaaaagtagcacatatggaactgtatctaagttttccttctcgcgtactatgaaattgtcattgttatgtacatcaatttactgaaactccatgtgattttttcttttggaagtcgtaatttatcttcttttttactttgagcaaatcatactaacactccctgaggtttcttgacattgtgcatgactacttgatttattcatgtttatagcaaccctttataggggtagatggtgtaatgtatgtgtgtttgtgacaagaggtgttagtgtaatgtttttcataccattaagtggatcggtgtaaccgtgtaagggtaaaaaaaggagacatattgggggaaatttgtcgaaatctcaaagagtgttaggataatttgttccttatctttttattgatcatgcttgatcatgtccttgtaattagcttaccaaaaaggttatacaggtcagttagctttccagttcttatgttttttaatggtttatataaagatttgtattgtcatattatgcatgaaggtttcacaagcaaaaaagatcttctctcttttaaagggttattgatgtgttcctgtttttgatttctgtccctggttatctctcccaggctctccttatatggaaaattgatgctagatcagtctgaaagtatgctgttcagatgttgtgtcaacatgtgtaaaatcttgatctcttttttgtgcttttataggggctacaagcggtttttcagacggtctttgcttgaaacctctgatttcctcaagaatgattgtttaaaaatcaactgtacagttggagttgtggtttcagcaattgattgcccacaactttactctattaacatcccggaatctgacattggatcacactttggtgcactattggataatatggaaggttcagatattacttttgatgtagctggggaaaagttccctgctcataagttgatgttggctgccagatccccagaatttcgatctaaattttttaatggtttagatgaggaaaagaatgagattattgtaacagatttagaaccaaaggtttttaaggtaaaaactatttgtttcccctttccttattttccttccctggtagcatcaagcttgttcaggatttattttgttattgtatatttttctgttagctttctttttcttgatagaaaaaggatcttataggagttcaagagttaaagtacaactagagaggatggatatcctgattattcctcttttacaggccatgctgtactttatctacaaagatactcttacagaagaggtgggcacggtttcatcaaccacaactagcaattttccggtttctgagacattgatagcaaaattgttagctgcagccgacaagtatggcttgggtaggcttagattgatgtgtgaatcctgtctttgtaaggacatttgtgtgaattctgtagccaatattttaaccttggctgatcattgccatgcctcggagttgaaagctgtttgcctaaaatttgctgctcaaaatctagcaggtatacttaatttgtattactttcttagttagcaatggcaatcgtgctaacagaaagactgatgttttctgtttaacttttgttgttaacaagtgactaaaaaatgtaaaagaaaaatgagttcagatacatgcatcctgtgctaactaaacacagctgtctggcatacacaactagataccaagcagaaaagatagatgttatagataggcctattttgggtaagatcctgtataaacacttgtaggagaagaaaataagaaagaaaaataaaataagtttctcctcagctaaaattagtttatgcataaatactagtggagaacaaaataaaatttcttgacttcaggcatactaaattacaatcttgctttatcttccaacttttctcattcttgatatgatggctctttttgcgtctggacttgttgcagctgtcatgagatcagatggatttgagcatatgaaagaaaaagggccatggctacaatcagagatcctgaagacaattgctgggtgtgaaggtgagggttgcagtgcagtggaaaaatctcagagtgtatggggccaactttcagatggtggtgacaagaatggtagaagggtcaggcagagaatctgatatatgttgtcacactggtatctctctgattcttttgtaaaatgtaggtgataatgctgaaaatttggggggtaaaaaagaaaacagcaaagaagagggaaaaccctcttctgttcaacttttccatgtttaaatggaaagtttagaaaaagcaggtagactaaatgttatgcaggtttttttttttttttttaatgtaaatgtcatcagtgggtgtatgttgttagtgcagaatggtaattgaaaatgagcttatctgcagtagactattgatactgactatactttggaagtggatatttggttgctggactttatctcttccatttgctttctccttttctgtactcggttccaaccgaatgtttgtagaagtaggttcattaggatggctgttgttatacaacttcaacattaacattacaatacctttaaccccatgctaattggggtcggtggtagatgactcaatgatagatatgagaaggttgaaaaaaaaaagtggaaggtgaaggagaagggaaagggaaataatataaaagaaaaaaaaaagagggaaagaaggagatgggagatgaagaggaaaaagactaaaaaaagatcatctagaacatagagataacaacgggtgtaacccttcaccaagcttataatttttctctatttcgtcctaagacacaccatccgtcaatctatatctcactctattaaatcttgtttaactacattttcccaagtaagtttcggtctacctctatctctcttttttggtaacaaacttttgttcttacgggaacatccagggaacgtctcattacgtgccaaaaccacctcaatctatgtttccttatcctttcactcaccggtattactgttacctttcttcgaatatcttcatttattattttattcatcttggtataatcacacattaaccttaacatcctcatttctgctatccctattttatgctcattctatctatgtgctggccaacatttagctccatataacatggatgtcttacacttgttctatagaaattttcttttagcttaagaaaaattttgcggtcacacaaaaatccagatgcactctgccatttcatccaccctgctctgattctatgatttacatctccatcaatttctccacctttttgcaaaattgattctaggtatctagaaacatatttctttggtacctctggaccaaataaatgcacgggatcttgatcaccatctcttaccagcgaaaatccacacttcatatactcagtcttgttccaacttaacgtgaatcctttagactccaaagtgtttctccacagttcaagtttcctattaacaccatctttggtcttatcagtaagaataatatcatctgcaaaaaaacatatacaacggtacttccttttgaatattttttgttagttcatctatcattaaggcaaatagataagaactaagagccgaaccttggtgtacatctaccgtaataagaaaataacttgatgtttcattaaaagctttcacacatgtggtagtcccatcatacatatctttaattgcatttagatactttaatggtattttttttcttcttgagagtccaccataaaacttttcttgggatcctatcttatgttttctcaagatctatgaacacatatgtaagtctttcttcttttctcgatattgttacattaatcgtcgtataaaaaaatagttttcatgtgacataaatccaaattgatttaaaaaaattttagtctctctcctcaagcgatatttaataactctctcacacaactagtatggctcataagcttaatgtctctatagtcagaacaattatgaatatctcccttatttttgtaaataggcataaacatatttttcctccaaacatcagacatcttatttgtttgaagaatcttattaaaaagattggtcagttattttattgtcacattcccaaggtctctccacactttaatagggacgtcatcgagtcctaaaactttattatttttcatcatctttaaagtctcattaacttcatgtgtattaattctgcgcacaaatcttttgtttagatcatcataagcgttctccaagtcgacctcacttttgtctccacctccattaaaaagtttgttaaagtagttcattcatatttcatttacatcttcgtttcttaccaaaaaaatttattttcattcttgatgcatctaacttgagtgaggtattttctcttttaatccctcatttttgtaatttttatatacttttttttactatccttgctcccaaggtttttatacaaatcggcaaaaaccttgtcccagcttcccgcattgcattctttgcttttttctcgctaatctaaacctttgcaagttttcatcattgagatttttatgcaaagatgtaaaacattcattcttctgtttaattgtcttctgccctctccattccaccaccatgttttctttgtaagaaatatgttttttttgctttctctcaacacctttctttccatattttggatacacatagtcatctcattccatatttcatttgtttctcttacagactaccacgatccttcacgcaacatgctttctttgaactctatttgtttttgtttttcctcatttagcttccataatcttataattgggttttgagtcatcttcctcttttaagtactttgttgaatcgaacctctagaactaccaatttatgtggcgtagcgacacactctccatgatagaccttgcagtcaatacaagaatttttatattctcttctaactataaagaaatcattttgactacgattttggttattatggaaagttataagatgagactccattttttcggaaaaaagtgttcgctagtatcaaatcgtaggctagtgcaacgttcaagatatattctctagtctcatttttcgtaccataaccaaaacctccatgaattttatcaaaacctgcattgcttttaccaacatgatcatttaattctctttttagagaaatcttctctcatggtatttctctcaaaatctcttctaagtcttctcaaaattggttcttatcaattatagtccaaattgggatgcatacacattaaagatatttaaaattaaacccctcactacaaatttgatcataatctttttgttaccttttcttttgttataccatgtacaaaatattcattttgtaacaattgtgttttcatggcacaccttcaaaggagcttcgactcagttacaccagtcatgccaaagaaacgtaaaataatacgggtcccctaaatcctaatatactaataattagcaccacctctcttttttggtaatgtttcgttaagaaaatctgaaatttgaggagttgagggaatacaatgttggttcggtgatgatacccacaatttgttacaccatatattacagttgtgatgaaaatcagaaacacattcattatcgaatcaaacattaagattttatagtttcttgaaaatattaacccaaaatataattcttacattttaattctgttaacttatatttaatattcttcgacaatcaaatttattatataagaagtgaaattctcataagaattccacgagtctaaaaaaatcaattaccaattaaaaaatgtattcgaaagatgttaatgtgttactaacattctaaagaaaagatcattagtacgaagaactcaattaacaaataacaggaattttaatgcaaagaaattttatgaaaacttaacttttatttcaaccatcatgtatgtttaataattttttagttgataaaatttcattccttacttttcatattattcgtacctaagaactttcttgtaaattgtatatccttttatttttttggttgaatcattgtatgtatttttttcaacaagaattcaaatattaatttgtcatgttatagattactagactcaattcctattggtaaatatcttgaaatacaaaacatatatatatatatatatatataactcttaattacacaagtatagctaacggaatttaagattagtagaatggattaatttttcacattatgataaattaaggttcaaactccactaaaagggatacttacctttaggctttgtttatgagttaggagggaaggaaatgaaagagattgaaggagaagggaggggaaggaaaggaagaaaaatgagggaagttccttcctccttgtttgggagttaaaaatatattaagagagaaatagagagttaataagatattaaatgtgaaaattataatttaaatgtaaaaatatattaaaaatatattttaatatatttttgaatgtgtagttgggataggataataattttaattacttttccttttaaaaattcccaaattggaggaactacaatttgtaggttttggaggatttcagagttttaaaaatcctcaaatcctttccctcaaaattaaaactctcaaataaggagatgtctctacctaaacctttcacttccctcccttcccctctaaaattcctctctcaaacaaaaccttagtgttcaacgatatctcgaaaagaaccttctagtaggttacatatatattggggaaattatacaagtacaatattttagccaaaaagttttgataaaaatgaagttacacacattttaaaatactaagatgaagtattaaaatgaatgggctcaaatactaagcccaaagccaatcccacgttttatttcatttcaaccgttgtcatttggttgaaacaataggtcaatagcattagcatagcatcccacaaaacctgaaaacctagcagaagcaagtgcaccggaaacaaagcagaaagcttgcaccggaaacaaagcagaaagcagcgatggaaaaccactcagatgaggagaatggcgtagcagaagaacctcaagcacttgaacagaaggagaagcgaaaggggaagcacgacaagccgaagccatgggacgacgacccaaacatcgaccactggaagatcgagaagttcgacccttcgtggaacgacggcggcatgctcgaagtgagctccttctccactctcttccctcagtaccgcgaaaagtacctccaagaagcttggcccatggtcaaatcctctctcaaggaattcggtgttgcttgcgaactcaacctcgtaactaccttcctctgttactcattctcttttttcctcctctagtttcaatccaaaaccctaatttcgccttcgattgtgacaatgcacaggttgagggttccatgactgtttcaaccaccaggaagactagggacccctatattatcatcaaagccagggatcttatcaagcttctatcacgaagtattcctgctcctcaggtaggtaggggtgtgtgtgtgtgtgtgtgtgtgacttctttctgttttttttataaataaaaaattcagtcatgttaatgttatttatgttgctatgattgttctcaggcgataaaaatacttgacgatgagacgcaatgtgacatcattaaaatcagcggcatggttcgtaataaggtattttctccgaagattttgcaaatgttttactgcgtgttcttcttgattgctgtgtgcctctatggttttgttttgttttatctttgaatatctattagcaatgatgcctctgccagttctatagtgctgctactgcgtgtgattgactaccctcatgataatggtcacttggtcaggaattgtatgcactgctgacaagatttgtggagcaataatcattcgtcttagtatacatgggaactgagatttagacgcaattatgacagttatttgtagaaaataactgatagtagttatgtatcaggagtatatatctgacagtaggtagtgtcaagttattttcagtttgttgaaagagaatactgagacttctgtctctgggacagcaagggtgtggctgtatttgtgtaacagtggacttttgtttctggggcagcaagtgtattgccatgttgtgtgtgatttcagtgttcaatataataatttattactttattaattggtgttctattaccttccaccagagtaatacaaatagaattcataagctatttttggttaagctttattgaattgcacccccaaagtcctctctttagctgctaaaaaaattcacattaaaataatttgaactgaacacgcacacttcaagctttccattgcaatgaaattaactaagcactttcaggagaccttctttagtaacattccagaaatttgaaaccatcgggctgccatggaagttattttttccccttatccttacttgaactgctcttttgattttgtattctaccatatgatttttgtattttgtcataatactttatgcaacttaagcatttcaaagaaattagtctgatggtaggaagttcccttgattttctgactgcaggagcgatttgtaaaaagaaggcaacatcttgtgggccccaattcttccaccttgaaggtgtgctttttgtgaagattttattttttcagcatttgtgggataaaccctttgttgttactttcttgctttggttttctggtactgcttaccaccaattgttggcttcaactttgtgactcacctttctccaactataatactggcttgcaggctcttgaaatactcactggctgctacattctcgtccaagtaagtttgacttacgcttcatagtttagaatgtgaagactgtacatttactttcactatgatatgagtgtagtctagaatcagctgatttctttttaattttgcacgcaattccacagggaaacacggttgctgctatgggttcattcaaaggcttgaagcaagtcagaagaattgttgaagaatgcatgctgaataaaatgcatcctgtatacaacattaaggttatttaatttgtattttatccagcttggctttgtggtatagattttgggcgtagaaaatatctcaattcttcttttcacattgtcaggttcttatgatgaagaaagaacttgaaaaggatccagcacttgcccaggagaactgggatagattccttccaaaattcaagaagtatgccttttatttatttgataaattgtatattcaaggtactcacccaccctctgcttcagtttcattgatgcttcatatctttttgtaggaaaaatgttaagcaaaagaaggttaacactaaacagaagaaaccatacactcctttccctccacctcaacagcccagtaaggtaagacaacctctaattaatatctctgatcaagctggatttcttccactaatgtacagagtctcctctactcatgtccccaacaacaacaaagtaaataattgactagcaaaaatatgtatgttattatgtattatatatatatatatatatatatatatatatatatatataagtagtaccagtagtactattatctgtacatccgattgtgccaattatcaaagtaagattatggtatggaaattttctatgaatattagaataccataaggcccaaccctaggcacacaggaatacccattacaaaagtgtctatggcctaatccctcccctatacaaaaatccagatttaatattactagcccaaaagtggaatggcagctcaaaatcattctctaaatatctaagccacatccagcagaagaaaattgcatcctccatcaatttctgtccattaaactcctcatttgagaaaacaattctgtttctgagattccaaatgcaccatgtgagagcaacccaccaaatccgccagctgttatggctagtcttttgattcttttgattgcactgtcacccagacttcttcctgtagctccttcctcagcctgatttctttctcattcgaatccctttcttccccttccttgttctgtattgtagtaggacccgactgagcccacctgcattttctggctatgttgtaattagtgtttaagcatttgctttcctatcatagtttctggtaattgctattgattttttaaagtaaaaaccttgtattttgtatctaactgatattttgaggggtatcaccttccactttaatttgtggcaatagacatacataggtgattgattgtgaaagatgattaagattcaactttgaggtttatcttcaggagttgatatggtccccttgtgggtatcttaggtacttttttttgggtttctatcataatgagtgtatcagacttagctcaagtgtgcattatctaggagcaatttgtgaatatatgaacttcatcttggcctttaaatgagaatgacaacaccaattccacaactacttgctgccctctgcttatattggcttttttcttttatttcccccctggggtagtgtatctgtattatatctaagtttttgacaaactatgttgttctggtactttgttaatctatgaaataaattttaagatgtctttggtaatttatgtgacatttcagattgatatacaattagaaactggagaatactttttaagtaacaaaaagaaatcagcaaagatatggcaagagaagcaggagaagcaggctgagaaaactgctgaaaacaaaaggaaaagagaagaggcctttatcccacccaaggtttatattgttatttcttttgcgattttctctactattcacaacaatttatgtcgtgcgtactattttacagttttttttcaaaacttttatttgcactctttactttaggagcctgcaaatctggtggataaatctgaggatgctaacaataatgtagctaacatggcaatgtccttaaaggtaaacaagtttctggcggaactttattaagaattttttctctttcttgtttgaccagttagaattgttggtttctttgcctaactggtattttctcttaaataaatcatcatctcacttaaattcaaaatggttcgtccgcagaaaaaaacagagaagtttgggaagcgtaaatctgaagaaaatataagtgccgagacatatattgtaggatcatcagaacaagcatcgggaaagaaacccaagaagcaaaggtcttaaacataatcttcattttggagacgaaagatgagcatgtgatttggatgtgaatttaatcaagatcttctgtatccaatgtcttggccgtaacagttttgacaccattgtatgaggcatagttgttcattccatttgtcgtggagatgagtgcgtggcatttttgtatcttattgtacttgccaatagacattaagtcagtaacatgtacaacacttctagtccttttaagttttacatcttttccttttcaaaaacattgtccgacacacatgttgatactatatctatagttttgacaatgtgatttatttgttaaatttggtctagtctcaaaaataaaagggaaaaagaatcagaaacacatttattcgagtttgccacttaagttgtttttaacgaaaccaaaatgaagtcacaaaatcagtaacgtatatggatattcttctaattttcctttcgtaagtttaataaatttatagatccctactaccatagttttaaagatcgaaatagttaatgcgacatacttaaagcattggatcaatggttgtcaataaataactaatttacttgcatgatcctgtctgtataaaaataatataaaaaaattatacatttattaaaaagtttcaaaaaaaatcactactcataaacataataaagtgtcaagtacctaaagttattaagcatagacattttttaaacacaacaaattgaggtagtactgaaaacaaatcaataatcacattacaagaaagttgtgtcattttgagtcattttaaagcaaaaaannnnnnnnnnnnnnnnnnnnnnnnnnnnnnnnnnnnnnnnnnnnnnnnnnnnnnnnnnnnnnnnnnnnnnnnnnnnnnnnnnnnnnnnnnnnnnnnnnnnnnnnnnnnnnnnnnnnnnnnnnnnnnnnnnnnnnnnnnnnnnnnnnnnnnnnnnnnnnnnnnnnnnnnnnnnnnnnnnnnnnnnnnnnnnnnnnnnnnnnnnnnnnnnnnnnnnnnnnnnnnnnnnnnnnnnnnnnnnnnnnnnnnnnnnnnnnnnnnnnnnnnnnnnnnnnnnnnnnnnnnnnnnnnnnnnnnnnnnnnnnnnnnnnnnnnnnnnnnnnnnnnnnnnnnnnnnnnnnnnnnnnnnnnnnnnnnnnnnnnnnnnnnnnnnnnnnnnnnnnnnnnnnnnnnnnnnnnnnnnnnnnnnnnnnnnnnnnnnnnnnnnnnnnnnnnnnnnnnnnnnnnnnnnnnnnnnnnnnnnnnnnnnnnnnnnnnnnnnnnnnnnnnnnnnnnnnnnnnnnnnnnnnnnnnnnnnnnnnnnnnnnnnnnnnnnnnnnnnnnnnnnnnnnnnnnnnnnnnnnnnnnnnnnnnnnnnnnnnnnnnnnnnnnnnnnnnnnnnnnnnnnnnnnnnnnnnnnnnnnnnnnnnnnnnnnnnnnnnnnnnnnnnnnnnnnnnnnnnnnnnnnnnnnnnnnnnnnnnnnnnnnnnnnnnnnnnnnnnnnnnnnnnnnnnnnnnnnnnnnnnnnnnnnnnnnnnnnnnnnnnnnnnnnnnnnnnnnnnnnnnnnnnnnnnnnnnnnnnnnnnnnnnnnnnnnnnnnnnnnnnnnnnnnnnnnnnnnnnnnnnnnnnnnnnnnnnnnnnnnnnnnnnnnnnnnnnnnnnnnnnnnnnnnnnnnnnnnnnnnnnnnnnnnnnnnnnnnnnnnnnnnnnnnnnnnnnnnnnnnnnnnnnnnnnnnnnnnnnnnnnnnnnnnnnnnnnnnnnnnnnnnnnnnnnnnnnnnnnnnnnnnnnnnnnnnnnnnnnnnnnnnnnnnnnnnnnnnnnnnnnnnnnnnnnnnnnnnnnnnnnnnnnnnnnnnnnnnnnnnnnnnnnnnnnnnnnnnnnnnnnnnnnnnnnnnnnnnnnnnnnnnnnnnnnnnnnnnnnnnnnnnnnnnnnnnnnnnnnnnnnnnnnnnnnnnnnnnnnnnnnnnnnnnnnnnnnnnnnnnnnnnnnnnnnnnnnnnnnnnnnnnnnnnnnnnnnnnnnnnnnnnnnnnnnnnnnnnnnnnnnnnnnnnnnnnnnnnnnnnnnnnnnnnnnnnnnnnnnnnnnnnnnnnnnnnnnnnnnnnnnnnnnnnnnnnnnnnnnnnnnnnnnnnnnnnnnnnnnnnnnnnnnnnnnnnnnnnnnnnnnnnnnnnnnnnnnnnnnnnnnnnnnnnnnnnnnnnnnnnnnnnnnnnnnnnnnnnnnnnnnnnnnnnnnnnnnnnnnnnnnnnnnnnnnnnnnnnnnnnnnnnnnnnnnnnnnnnnnnnnnnnnnnnnnnnnnnnnnnnnnnnnnnnnnnnnnnnnnnnnnnnnnnnnnnnnnnnnnnnnnnnnnnnnnnnnnnnnnnnnnnnnnnnnnnnnnnnnnnnnnnnnnnnnnnnnnnnnnnnnnnnnnnnnnnnnnnnnnnnnnnnnnnnnnnnnnnnnnnnnnnnnnnnnnnnnnnnnnnnnnnnnnnnnnnnnnnnnnnnnnnnnnnnnnnnnnnnnnnnnnnnnnnnnnnnnnnnnnnnnnnnnnnnnnnnnnnnnnnnnnnnnnnnnnnnnnnnnnnnnnnnnnnnnnnnnnnnnnnnnnnnnnnnnnnnnnnnnnnnnnnnnnnnnnnnnnnnnnnnnnnnnnnnnnnnnnnnnnnnnnnnnnnnnnnnnnnnnnnnnnnnnnnnnnnnnnnnnnnnnnnnnnnnnnnnnnnnnnnnnnnnnnnnnnnnnnnnnnnnnnnnnnnnnnnnnnnnnnnnnnnnnnnnnnnnnnnnnnnnnnnnnnnnnnnnnnnnnnnnnnnnnnnnnnnnnnnnnnnnnnnnnnnnnnntttttgaacgaaaactgatttaaccataatatgttagaatgttaattacaattaattgattattaaatttttggttgccccacccattatctacaggaactgaaacataggcggtctaatcgtagaaagaataactctgatagcagagatcgaaacataaaatctccaagccataattcgggtgcatcaaatataaaggcagttgagaatattggtggaaacagtgttgaagagtctggaagctataattctcgaaggaaacaaaaagtttttcacaagcaaccatcttcccttaagcagcggtttttctcaagtaattttagaaatcatggaactggtcgaaactctcacggaatcatatctgaaagcccgcctagtaattcggttgggtttttctttgcttctacgcctcctgaaaatcacaggtcagttcaaaattattgttcccagtgctaatgactgtaatattggtttgcttagccagccttttttttttttttcacttttatcctttactggaagaatatatagtaaataatttgttaaattaagaatataaattattactgtttcagagagtatgatatgacatgttgattgtttggtttgacaactgaagctatttccattaattatcttaaatttgcagtttcaagccttccaaattgagtagttctataggatttgcttttagaagaaaacggtttcaaacaacagaagtaaatgataatgcatactggttgtatgcatgagagtggtactaggatatagtcctataggatttgctttttaaaaattcctcatgttagtattcttcctttcaggtacttgaagtatcacaaacggtgcctgaatgatagaaagaaacttggaattggttgcagcgaggtgaactccatttcttacgtttctatgaaaaaatatttgtaaagaaccacattggtagcccaccgattgaactcattctcaatttctgttcctgttacttttattgtgcatcatgcaccgaaagttgaatatattgcctgccttttttattacttaatttgttaattgaatgacttatcttctaaagtactttgtgtacgagtatgttgcaatagttcgagtgaaaattgtggaatagttacgacacgtggtattttcaatattggtttgcattggtcaactttctctttttaacttaacaatgtcattagccgaagctttcatatcaaaatgagcctggatgcagtgctgccatcttcattagctcactttgtatattatgcattcatatttttttttatacatttcggttttcatattatttgcaaatttaatatttttgtattatattctttttcaatcatacacttgcttattctggtaggtttttctttctcctccttttgtgtgtcaatgcaggaaatgaatacattatacagattctggtcctattttcttcgagacatgtttgtgccttctatgtataatgaatttaagaaattagctaaggaagatgccgcggctaattataattatggtatagagtgccttttcagattttacaggtaccatttccaattctgtcttttctcatttgtttgagaagatagaaccatgatttagatttcatcttttgctccattttgttgagtaaagtaataggctaatttcaagtcttctgaattttcatctattgtttctttggagaagctgattaaattgctttatgttgtctatttttatttttatttttccttagaagacatccaagcatagttcttctaatttttgaatgattttttgctcagttatggattggagaaggaatttagagatgatttatacgatgattttgaacaactcactatggatttctaccataagggcaatctgtatggcctggaaaaatattggtaaaaaaccaaattctcttgcttcttatattctactgcatattttctgttttgtagtttcattccttttcccaatttcatgtgagatttgttatagtgaaagaagtaaacatattggttggttagtgtataacctaagttgtattctagattaaaaagattgttcactggtctatgaaatctaattatacagtaccttagttatatttgattatttctgtttgtctgacttgtttgtgtcacaaaatctttataacatagtttctgactgcattattggactgaaatggagcattttgtttattcttgatggtagatttgtggaacagtatgagcagttctaaatgttaagaatgtgcatgttataacactactcacctatgcttagctaatccaaaatagatcatcatattggaaatatgttagtttctatgtcaaatgctagcatactattttattaatattgcatttctatatttttgggtgaatggaggttgccatattctaaggcaaggcactgtctccctcatatctgttggatatagagaaatgtagttttcttctgttgttttggcactcctcttcaccatattatcactctctagaacttttgttcttacatatttatatttatatttatggcattggcagggcatttcatcattaccgcaaggtccgtggccagaaagaaccgttgaatcaacaccctgaactggacaggttgcttcgagaagagtatcctagattggaggatttccgtgccaaagaaaagagtatggtaaaagaggatgtcaattaagttgagtgatatgtccaaatggtaaatacaaatggcagagttttgatggcatccccaattttgatgagaactcttaacaacataacaatgagttgttgtggagtagcggcctactttttgaaagaagattgtttgtttcttctctatatttggttgagttgattatgcctcatcaagaggattgctgatagccaagtcttttcaggtttctttgatggatcattctatatggtatataccactgcatcctttctttggtgaatcttgcaaacattgagagacacattttcttttctccaaatgttgtacataagttgatagactagaagttgtgacgttacagcataagaaaaagaggttcttgtttttatttttggtgggggttaaaagggggaaaagggttgtacttatatctttgccaaatttgaacaataagagtgagaatcttcttactttgtaacttggcgtgctcatttaatttatatgtaacaattattgtcttaccaaagtgttattggtatggtttataaagcaaaatgtttttggtacgactaaaatgggactagttgtctcttttaattttgggagagtatttttggaatgattgtctgtgaaaaagataaaagtcaaggtaaaacaattatatgcggtgtaagatgaaatgaatttaaattatttgatgtttcttcatcatcatcaacatcacatttaacctaagttaattggaatcggtggtagatgaactcaatattagatatgaaaaagttaaaaaaaaaaaaacnnnnnnnnnnnnnnnnnnnnnnnnnnnnnnnnnnnnnnnnnnnnnnnnnnnnnnnnnnnnnnnnnnnnnnnnnnnnnnnnnnnnnnnnnnnnnnnnnnnnnnnnnnnnnnnnnnnnnnnnnnnnnnnnnnnnnnnnnnnnnnnnnnnnnnnnnnnnnnnnnnnnnnnnnnnnnnnnnnnnnnnnnnnnnnnnnnnnnnnnnnnnnnnnnnnnnnnnnnnnnnnnnnnnnnnnnnnnnnnnnnnnnnnnnnnnnnnnnnnnnnnnnnnnnnnnnnnnnnnnnnnnnnnnnnnnnnnnnnnnnnnnnnnnnnnnnnnnnnnnnnnnnnnnnnnnnnnnnnnnnnnnnnnnnnnnnnnnnnnnnnnnnnnnnnnnnnnnnnnnnnnnnnnnnnnnnnnnnnnnnnnnnnnnnnnnnnnnnnnnnnnnnnnnnnnnnnnnnnnnnnnnnnnnnnnnnnnnnnnnnnnnnnnnnnnnnnnnnnnnnnnnnnnnnnnnnnnnnnnnnnnnnnnnnnnnnnnnnnnnnnnnnnnnnnnnnnnnnnnnnnnnnnnnnnnnnnnnnnnnnnnnnnnnnnnnnnnnnnnnnnnnnnnnnnnnnnnnnnnnnnnnnnnnnnnnnnnnnnnnnnnnnnnnnnnnnnnnnnnnnnnnnnnnnnnnnnnnnnnnnnnnnnnnnnnnnnnnnnnnnnnnnnnnnnnnnnnnnnnnnnnnnnnnnnnnnnnnnnnnnnnnnnnnnnnnnnnnnnnnnnnnnnnnnnnnnnnnnnnnnnnnnnnnnnnnnnnnnnnnnnnnnnnnnnnnnnnnnnnnnnnnnnnnnnnnnnnnnnnnnnnnnnnnnnnnnnnnnnnnnnnnnnnnnnnnnnnnnnnnnnnnnnnnnnnnnnnnnnnnnnnnnnnnnnnnnnnnnnnnnnnnnnnnnnnnnnnnnnnnnnnnnnnnnnnnnnnnnnnnnnnnnnnnnnnnnnnnnnnnnnnnnnnnnnnnnnnnnnnnnnnnnnnnnnnnnnnnnnnnnnnnnnnnnnnnnnnnnnnnnnnnnnnnnnnnnnnnnnnnnnnnnnnnnnnnnnnnnnnnnnnnnnnnnnnnnnnnnnnnnnnnnnnnnnnnnnnnnnnnnnnnnnnnnnnnnnnnnnnnnnnnnnnnnnnnnnnnnnnnnnnnnnnnnnnnnnnnnnnnnnnnnnnnnnnnnnnnnnnnnnnnnnnnnnnnnnnnnnnnnnnnnnnnnnnnnnnnnnnnnnnnnnnnnnnnnnnnnnnnnnnnnnnnnnnnnnnnnnnnnnnnnnnnnnnnnnnnnnnnnnnnnnnnnnnnnnnnnnnnnnnnnnnnnnnnnnnnnnnnnnnnnnnnnnnnnnnnnnnnnnnnnnnnnnnnnnnnnnnnnnnnnnnnnnnnnnnnnnnnnnnnnnnnnnnnnnnnnnnnnnnnnnnnnnnnnnnnnnnnnnnnnnnnnnnnnnnnnnnnnnnnnnnnnnnnnnnnnnnnnnnnnnnnnnnnnnnnnnnnnnnnnnnnnnnnnnnnnnnnnnnnnnnnnnnnnnnnnnnnnnnnnnnnnnnnnnnnnnnnnnnnnnnnnnnnnnnnnnnnnnnnnnnnnnnnnnnnnnnnnnnnnnnnnnnnnnnnnnnnnnnnnnnnnnnnnnnnnnnnnnnnnnnnnnnnnnnnnnnnnnnnnnnnnnnnnnnnnnnnnnnnnnnnnnnnnnnnnnnnnnnnnnnnnnnnnnnnnnnnnnnnnnnnnnnnnnnnnnnnnnnnnnnnnnnnnnnnnnnnnnnnnnnnnnnnnnnnnnnnnnnnnnnnnnnnnnnnnnnnnnnnnnnnnnnnnnnnnnnnnnnnnnnnnnnnnnnnnnnnnnnnnnnnnnnnnnnnnnnnnnnnnnnnnnnnnnnnnnnnnnnnnnnnnnnnnnnnnnnnnnnnnnnnnnnnnnnnnnnnnnnnnnnnnnnnnnnnnnnnnnnnnnnnnnnnnnnnnnnnnnnnnnnnnnnnnnnnnnnnnnnnnnnnnnnnnnnnnnnnnnnnnnnnnnnnnnnnnnnnnnnnnnnnnnnnnnnnnnnnnnnnnnnnnnnnnnnnnnnnnnnnnnnnnnnnnnnnnnnnnnnnnnnnnnnnnnnnnnnnnnnnnnnnnnnnnnnnnnnnnnnnnnnnnnnnnnnnnnnnnnnnnnnnnnnnnnnnnnnnnnnnnnnnnnnnnnnnnnnnnnnnnnnnnnnnnnnnnnnnnnnnnnnnnnnnnnnnnnnnnnnnnnnnnnnnnnnnnnnnnnnnnnnnnnnnnnnnnnnnnnnnnnnnnnnnnnnnnnnnnnnnnnnnnnnnngtaatattagttaaaatttattaaaacctataaaattgaaaaaaagtttttaaatgagaagtaggatcataaaatttgtgacctctaataaattttaactaataataaatattgtgtttaaaataactttttaaaaatgtattactataatttctcatttatttggataagtaaatttattatgattaataattttgaaatctttgggtaagcaactttgaaagaattttttttttttttcaaattttaaagaataacgagtgtcacttgggcgccaaattttagcgcgtcatgctttgttaaataagaagccctgtcaacggaaagaaaggcaatttgagtttgaagcttcaaactttgaaagccataaaagaagaaaacaatgtctgagttctataataacgattggaatgatgatgtttatgactacaatctgctttttgattgcgatgatatatggtcgacgctgaactttgctacccagattcctatggcggaggacacccaacaccaccacacaccgctgaacgttgcaaccctagttgcggaggacacccaacaccaccagacaccgctgaacgttgctacccaggttgcggaggacacccaacaccaccgcacaccgctgaacgttgctaccctggttgcggaggacacccaacaccaccagacaccgctgaacgttgcaaccctagttgcggaggacacccaacaccaccagacattgcccaatcacgtgaaccagattgcgtgggctccggtcgagttgcccagccacccagttgaggcgctggtgcataacggtggtggttccatgatgcagaacgctggttcatcggttcggcgcaagcaagggagaaggaatacatggactgaagaagaacataggtaggtttttaatatattgtatagaaatcaaatgaatggaagtttctcgatttttcctctcatgatcatatttgttttttaatggcaggttgtttttacttgggctccaaaaacatgggaagggaaactggatagaaatatcaaggttggttaaaacaagatcccctactcaaattgccagtcatgcccaaaagtatttcattcgccaaaatgcctcacccatgcagaaaaaaagaaaaagcattcatgataaaaacttacattacacgaatggagttcctcacatcattgatcctcaaaattcaattcctcttactggaattcaacaagttcacgaaatgcaacaaaaaaaacaaaagttgccgctgaatccaccaaatagcgtgactcatcaaatgagtggatttgattctgcatatcaacaagttcatgaaaatcaacaaatattgcatgtgaattcatcaaacagcccgactcttcaacttagtggatttgaatatggtgatgaccacattggaatacaaggcttgctggaagctgtactatctgtaatattttcaccgtagtatgattctttaatcccagcataggttgtggtctggtgtaaggtgtaagagtagtgaacttatcaagtaattagggattttgatatttgtacatggattagatattggaattttctcatcaattaattactttcttttattgactttgatgtgcaggtcgtgaccaacttttagtaattaataatattacaatccatttcattcttaaaaggaaaagtaaacttgtattttttataataaattttaaagacttcttcctcatctgatccaagatgaatagcacacatgcacttgacatattaccatactcgctgagcaaatgtctagtagcttccattttttcaggcttacactagtgccttttcgatattcttagagatgagtccaggaacatccttgaggggatggaaagtgagtccaactgtatggaaggatggtgcaccatctccaaacaatagccttgttggtacatcatgtaaagctaggcatttcgacaccgctggtggtgcaaaagatgagatgggtagtcttggacttgggttgaccccattccttgatcgatcgccttagttgcagcctcttttcccaactttggtgccgatagccatgacagtggcagggccttctgcacgttgtgcctgacggatctcttcaacactgttaattttctgaagcaaagaatgaaagtgaagaagtagcaacgaaagaaaaggctttgatggatgttgcaaagtgggtttggaagggtggatatatatatatatatatatagagagagagagagagacgtagaatgatagaatgatgcataattgaattgaaaagggtaggtacatgcatgcagtgcatgcttccttcctctgatattgcgcttgtggtgtgcacccactgcatgtctaagttcaccgctgacaaccaacccacttgtttcctctttggaattacttttctattgctgttttttaaagagagttttcagaaaaataattattttcaatcacgtgttgttttttttttccctctttagttcattatcttccacaattattttactttgatatatcaagttttaaaaattttattttgttcttttatgtttttgaaatatattgttttgatcattcttttaatttttcatttaaaacgttaatatttcgttaatttttaaatttaaaataatcaaaatgatacatttaaaaaacataaagaatcaaaatgatacattttaattaatggatttcctaactaacctacccaagattatctaaccaaattgagtaatttaatataaaatattatttttaaattttatcaattaacaaatgatcactagtatataattaattagaataggccattaaccaaatctaaccaatttggttatgtagtttgttgtgaggtctaacatgtttttaaataatatattttataaaattaaaaatattattttttatattatcattacattaaatagaataacattattgaaataagtaaataatatatttgaaggaaattaattttaaaatattttagtttttctttaaatttatcttatatttcaatttttctaagcttttttagtttgcggcaatttcagaattcgtaattacaacaatatatttagtaaatattttttaattatttactaaatttattaatgtagaagcgagaaaaaggagtcagtcaataaaaagggcacgtataattgtagattaatttattactgtagattattatactttatcttttgactatgacttagatgttgttatgcttgcaagactttagatatgataggaacgagtacaatgtactagaggtgaacaaggcttagttatgagaattgcatggacccaggatttgttcataacatatcaaggggtgaaggaagagacgtgtttcatctaactgaattcaagacctactacttcttaagtggtggaggctattgttggcatgggatgaaggttgctatatctgttactgaaggtgttgctgcacccactccagcaccttcaccaaaaggtggtgctccagcaagttcaccagaatgtggtgctccagcaccttcaccagaaagttgttgtgcttcagatggcattcaagtcaaccaaatacctttggtgttaatctttgtcttgatgtgggatatctcttctgataacaccagttactagaaatgctaggccatatgtactattgcaccagttgtaattgttgtattgatttgactttgtgtgatggtaagttaaactatggaattcaaggtatcttttaaatttactaataaattgtttggcctagtggtgtggtttagatagtttatatgaagttgcaagttcaaatttcattgtcccgctatcgtacacaaaaataaataaagaatctattcgcacatactactattataatagtaatgccaaacaatattatttgagaaaaagataaaaggaaaaaagggaagagagattgtttatcatgaactaattttaatgttttttttttttcgtttttaacaaatcaacaattttggatcatgtgctattacttaaaacttaccaacaaagcaaattttccattagttttgtgtaaatatatagctactgcaaatgttggatttaaatgaaccctatatagggaagaacaacaggattaataagggacaatattctttggtttcatgcgaggcatttgccaatacaaaatatagagaatccgtatgggcacgaaacaaagtaaaatctaacttgttactacattaaacatgtcctccaaaaccaatagtattagatggcacaaaagacaaaaaaattatcaataagatctctttgtgccgtttgatttgaagctcagtgcaatgaagtgaacttttgcgtgatatgatcaaaaagcacacaaaaaatcaagcataactgttcagcaccaacatcagaataacaaagagaacaaaaacttttttggtgtctgctgtttgtccgtgttcagggtaggggatcagaatttagaaccataatgacttccattagaaagaaaacaacaaacatattacttttatgaccaacattgcctttgaaaaggtatttgcgattaacagtcaagaacagtgaatatcttttacggcttctcgtgttgaatctgttctacagtcaaggttggtaacaaagccacagcctcaccatcaatcacaagaaggtcatcattcttgaaacaccttgtcttaaactttgcactgaatagcattgagaaacattcatttagaaacaaaattactccttgtttaaaaaagaatgcacaataataacagcaggactaaacttacagatatcgatttttattttctctcagattagttgcttgcacttcaccaataatctgatctccaatatagactgggaacttaaaattcaagttttgagatacatacacagctccaggctgcaattattgaaaattgaagtggccagggaagaagaggaatttaagaaagttatcacagaatgagaatatttcaatgaatgacttcatagcattgcctcaattcacatcattaagcactttaaaatcaagtcttttattcaagttgaccaaatccaatgacaagtaccaatttttcaagcagtagaactagaacccgtgttagcatttaaattgaccacttaatagcatgttggtgatttgcattttccaaccacatccaaaaccaaattcacgtcatgtatgccaagttaatgtggaagctaaaaaaatttacttcaaaaggacgcggatcacactgacataacgccaatccagacacacgataagtcctttatccatgtttttattttcatgtctttcagaaatactataaaatttaagctttttacatgtgtctccctttctacttctgattaatcatgacacattttaatctatgcaataagtgaggggtcacttgaccttatttcacactccttatagtggagattacaattccacatcttatccgtcttcattttatgatactctatctcatgtcataattttccattatggtgtctaatactcaagtttacagaaaggatgttcatgggggcaaggggatttggacccggaatcaacttagagttccccaaagctgctgactgtggcagaaatctcacacttacaaaaagcacaaacaaattaacttttacatgtaaaaatgtatgctacagagtacagagtataaaattcagtctagaaaactaataatagaactctactaatttatctgtttattcacattaatttaatattgagatgagaacgttaactatctcattttaggaggcatatcaaaatttaaagagagggtaagtatgaaacttacaaaatgtgatgagatgatatgaggaaagagagaagccacaagcatcccatgtaccagtggaccttcaaatccaacatctttggcagcagcagaatcagtatgcaaaggattagaatcacaactcaccttggagtattggagaacatcttcctcagtataaacccttgcttttctcaagacatccccaggcttaattacattaggagttgcagaagtaaagcaccttaggctcagagaatggactttgtgacaatgtaaatttcttatgagcatttttgcaagggttcaaatcaacaaaacaaggccctgatgtggtcccccactaactgtaaatcaagtaaagtgcaacttaatattcccacaactggtagatgaggtttcttgaggtaactggtggcatggacttaggtcaaacagctggtgggcgtttgagcagcacgggaaacagtgtacattggtcaatggtatgggttcattgctcttggagggatattaacacaagcagaattatagggtgctgttgtcaagggattactggtctcatgcactatgtttgtcaaaatctgataagttttatggagcctagtttttttacggatcagaaagatgcaccacacaggtaaataagaaaaaataacgaattacttttaaatttttacaaaataaattaatttttttttcatttttagaggttgagtatatgtatatccaacttattttatgtcaatgtaactcttcacgtcatcaatttttttcttgcatgatcctgtattcctgcctgtattaaaataatataaaaaatttatatatttattgaaaagtttcaaaagaaatcactattataatgattaaggtgacaattataataaaattttgaaaaattaattgtgtttgttatttttatgataatggttaaaattattatcatttaaataaaaaatagttgtaattttatgtgaaaaaataataattttttaaatattattacttattaaaaattagacatttaaataattataaagaatttttttaannnnnnnnnnnnnnnnnnnnnnnnnnnnnnnnnnnnnnnnnnnnnnnnnnnnnnnnnnnnnnnnnnnnnnnnnnnnnnnnnnnnnnnnnnnnnnnnnnnnnnnnnnnnnnnnnnnnnnnnnnnnnnnnnnnnnnnnnnnnnnnnnnnnnnnnnnnnnnnnnnnnnnnnnnnnnnnnnnnnnnnnnnnnnnnnnnnnnnnnnnnnnnnnnnnnnnnnnnnnnnnnnnnnnnnnnnnnnnnnnnnnnnnnnnnnnnnnnnnnnnnnnnnnnnnnnnnnnnnnnnnnnnnnnnnnnnnnnnnnnnnnnnnnnnnnnnnnnnnnnnnnnnnnnnnnnnnnnnnnnnnnnnnnnnnnnnnnnnnnnnnnnnnnnnnnnnnnnnnnnnnnnnnnnnnnnnnnnnnnnnnnnnnnnnnnnnnnnnnnnnnnnnnnnnnnnnnnnnnnnnnnnnnttttttgttaattaatattttgaaaataacttgttatgtaaaccttaattatgcttttctctgttcatatgtttttgaagatttagactttaaagtgcacctttaaaactatcttttctgggattgagttttctggtgtattgtagtatttggtttcaatcagttgaaaagtatgtctaattttcatgataaatgaagttgtggaaggttcaaattgtaataagagaaccatgatccttgatcttaatttgtttatgtccctattcatctcttaaattatgatctccatcacaaaggatcctacattctattagataaatacttgaatgcataaccactagggtcaatctagtgacagagctttaaggtaatatgcataagatcataagtttgaacctatcattgtaaaaaaaagaagataaatacttatatgtaaacgcccatgccatgattccaccatacagggaaatttttgtcttgtcatactttcttatctgggttgccggtgtctgaatgcttcctttttttgatattggcctgttaaattctaaccttttttttttgtatttaagcaatcttattcttttgttcagttagatcatttaattgacaatatgttgtgtggatgcatccttattgcaggatgcagcttgagggtcggccctgaggcaggatcaacagggcgtctattcagggtctaaaattttttgtctgggtagtttaagtaaaatttatttttttaaaaaataaaatatatgttaggggtttattttatgtgttagagacccattttttctatctcttagttttaatattatttgtatttcaaaaaatttgtgtgtcagggtccatttttccatccattagttttaatattatttgaatttcaaaaaatttatgtattaggggcccattttttgtgtgttagagatccatttttttcatcccttagttttaatattaattgtatttcaaaaaatttatgtattaagggctcattttttctatctcttaattttaatattttttgtattttaaaaaatttgtgtgttaggagacatgtttgtgccttctatgtataatgaatttaagaaattagctaaggaagatactgcggctaattataattatggtatagagtgccttttcagattttacaagtaccaattccaattctgtcttttctcatttgtttgagaagatagaaccatcatttagatttcatcgtctattttgtcgagtaaagtaataggctaaagtcttctgaattttcatctattgtttctttggagaagctgattaaattgctttatgttctctatttttatttttatttttctttagaagacatccnnnnnnnnnnnnnnnnnnnnnnnnnnnnnnnnnnnnnnnnnnnnnnnnnnnnnnnnnnnnnnnnnnnnnnnnnnnnnnnnnnnnnnnnnnnnnnnnnnnnnnnnnnnnnnnnnnnnnnnnnnnnnnnnnnnnnnnnnnnnnnnnnnnnnnnnnnnnnnnnnnnnnnnnnnnnnnnnnnnnnnnnnnnnnnnatggcagagttttgatggcatccccaattttgatgagaactcttaacaacataacaatgagttgttgtggagtagcggcctactttttgaaagaagattgtttgtttcttctctatatttggttgagttgattatggctcatcaagaggattgctgatagccaagtcttttcaggtttctttgatggatcattctatatggtatataccactgcatcctttctttggtgaatcttgcaaacattgagagacacattttcttttctccaaatgttgtacataagttgatagactagaagttgtgacattacagcataagaaaaagaggttcttgtttttatttttggtgggggttaaaagggggaaaagggttgtacttatatctttgccaaatttgaacaataagagtgagaatcttcttactttgtaacttggcgtgctcatttaatttatatgtaacaattattnnnnnnnnnnnnnnnnnnnnnnnnnnnnnnagttaaaaaaaaaaaaacaaatgctaagaaaaagaagaaatgagacaagagaaaagaaaaaattatttgatgtttcttgataaaaaaaatattagttaatgtttatagcaagtaaaattagtcactgaaatggagatattcatgacagaaccaaaaaattatttaatgttccagtattggaatcgagtttaaaagctgaaaacatagttttggtggttgtcaagcctgtttagcagcattgcagccaatgaaaacatgtcagtgagtttccaaattttataaacggtgagaacaaagatgaataaatgactctaagaaatccatataagcactttccattggagatgctcttattaccctatatcaagtattcttgtttcttaatttattgtgtgctctttttaaaacaaaatcattattttgaaaaataaaaatattattttctaaattctgattgcacaaaatacaagaacatcattgaaatgagaaaatcatatatttaaataacttttttatatatttttaaatttttatatttcagaattttcttaacattttaatttgaggtcaaatttgaattcttaattataacaatatattattagatacattttaagataatttgatgttattgaattctgtttcaataaattattctgtttcaataaattactttttatgttctaaaaatattgatacacaataatataggctattttgagtattttttttcttttgtaattaatacttaagtttctttgatttggtaattatcttataaactactttgctacacaagtttattttagtgacttattttcataaattatttgaagtagtttataaaaaataaattagcttatagtttaatttttctctcttaattttatccttattattttatttgacattcggttttactctttcgttcaatttaaaaaaatcatctttttgttgtttaggaaaaaaatcctattgtctaatttatcatttttactaggcatgacaacgaggatgggttttgcatttcccatccccgccctctactctaaaaccgctctctgatccctattgggattaaaaatatataccccatctcggatggggtcgattttccccgtctcgatccaccctcgctaattaattaaaattaaaaaaattagaaaaataatataacttttgttattgaaaaaatgggccgaaaatgctagttacataacaaaaaaataataataaattcacattcaaaatatgagagtgagatcataattaaaaattacaaaaccaaatcaattagtttaattaaaatcataaaatatagttattgcataaaataaggacatgcatatttaatttctcacaaaatacgatatcatttaaatatatattgtccaaaaattaagtagcacatcatatgattaagtatcacatcctttaaattacataacaaaaaaagaaacaacttaaatataattttttttaatgttatttattacggggtggttcagggcggatatcagttatcccataccccccctttttaattaacagggaaaatccgactccgaccccaaacccggtcgacttgatttttccccatcaaagtcggggagagttcgattcgatccccacggggtcagattccggtgtcatgcctaataccaaatcatgctttttcctctctattttttagtaatatcggtgactttttaatatttcatttatcttttaaataaattctaaaatatattttgtttaaaaattaaaaaatcaatcaaattacttaattaaatcaatctaatttttttggattgataaattttgaaatatctaaaaaatcttattgtattcaatcatttgaaatattttaattgttttaaatctatttttttgtcaactttgagattttcaaataaaaataggtgaatattgacgaatgcagtgcatttatttaaataacagtgtaagggtaggaaggaaatcaactttggtcgactcgattttgaaagatttgtgactaatctgttaattgaaatataagagttaattttagtttaattatattatataaattattttaaaatttagtttaagtcttatacttcttaaaaaattatttaaaatctcactttttagtgataatattaacaaataannnnnnnnnnnnnnnnnnnnnnnnnnnnnnnnnnnnnnnnnnnnnnnnnnnnnnnnnnnnnnnnnnnnnnnnnnnnnnnnnnnnnnnnnnnnnnnnnnnnnnnnnnnnnnnnnnnnnnnngtaatattagttaaaatttattaaaacctataaaattgaaaaaaagtttttaaatgagaagtaggatcataaaatttgtgacctctaataaattttaactaataataaatattgtgtttaaaataacgttttaaaaatgtattactataatttctcatttatttggataagtaaatttattatgattaataattttgaaatctttgggtaagcaactttgaaagaatttttttttttcaaattttaaagaataatgagtatcacttgggcgccaaattttagcgcgtcatgctttgttaaataagaagccctgtgaacggaaagaaaggcaatttgagtttgaagcttcaaactttgaaagccataaaagaagaaaacaatgtctcagttatataataacgattggaatgatgatgtttatgactacaatctgctttttgattgcgatgatatatggtcgacgctgaactttgctacccagattcctatggcggaggacacccaacaccaccacacaccgctgaacgttgcaaccctagttgcggaggacacccaacaccaccagacaccgctgaacgttgcaaccctagttgcggaggacacccaacaccaccagacattgcccaatcacgtgaaccagattgcgtgggctccggtcgagttgcccagccacccagttgaggcgctggtgcataacggtggtggttccatgatgcagaacgctggttcatcggttcggcgcaagcaagggagaaggaatacatggactgaagaagaacataggtaggtttttaatatattgtatagaaatcaaatgaatggaagtttctcgatttttcctctcatatttgttttttaatggcaggttgtttttacttgggctccaaaaacatgggaagggaaactggatagaaatatcaaggttggttaaaacaagatcccctactcaaattgccagtcatgcccaaaagtatttcattcgccaaaatgcctcacccatgcagaaaaaaagaaaaagcattcatgataaaaacttacattacacnnnnnnnnnnnnnnnnnnnnnnnnnnnnnnnnnnnnnnnnnnnnnnnnnnnnnnnnnnnnnnnnnnnnnnnnnnnnnnnnnnnnnnnnnnnnnnnnnnnnnnnnnnnnnnnnnnnnnnnnnnnnnnnnnnnnnnnnnnnnnnnnnnnnnnnnnnnnnnnnnnnnnnnnnnnnnnnnnnnnnnnnnnnnnnnnnnnnnnnnnnnnnnnnnnnnnnnnnnnnnnnnnnnnnnnnnnnnnnnnnnnnnnnnnnnnnnnnnnnnnnnnnnnnnnnnnnnnnnnnnnnnnnnnnnnnnnnnnnnnnnnnnnnnnnnnnnnnnnnnnnnnnnnnnnnnnnnnnnnnnnnnnnnnnnnnnnnnnnnnnnnnnnnnnnnnnnnnnnnnnnnnnnnnnnnnnnnnnnnnnnnnnnnnnnnnnnnnnnnnnnnnnnnnnnnnnnnnnnnnnnnnnnnnnnnnnnnnnnnnnnnnnnnnnnnnnnnnnnnnnnnnnnnnnnnnnnnnnnnnnnnnnnnnnnnnnnnnnnnnnnnnnnnnnnnnnnnnnnnnnnnnnnnnnnnnnnnnnnnnnnnnnnnnnnnnnnnnnnnnnnnnnnnnnnnnnnnnnnnnnnnnnnnnnnnnnnnnnnnnnnnnnnnnnnnnnnnnnnnnnnnnnnnnnnnnnnnnnnnnnnnnnnnnnnnnnnnnnnnnnnnnnnnnnnnnnnnnnnnnnnnnnnnnnnnnnnnnnnnnnnnnnnnnnnnnnnnnnnnnnnnnnnnnnnnnnnnnnnnnnnnnnnnnnnnnnnnnnnnnnnnnnnnnnnnnnnnnnnnnnnnnnnnnnnnnnnnnnnnnnnnnnnnnnnnnnnnnnnnnnnnnnnnnnnnnnnnnnnnnnnnnnnnnnnnnnnnnnnnnnnnnnnnnnnnnnnnnnnnnnnnnnnnnnnnnnnnnnnnnnnnnnnnnnnnnnnnnnnnnnnnnnnnnnnnnnnnnnnnnnnnnnnnnnnnnnnnnnnnnnnnnnnnnnnnnnnnnnnnnnnnnnnnnnnnnnnnnnnnnnnnnnnnnnnnnnnnnnnnnnnnnnnnnnnnnnnnnnnnnnnnnnnnnnnnnnnnnnnnnnnnnnnnnnnnnnnnnnnnnnnnnnnnnnnnnnnnnnnnnnnnnnnnnnnnnnnnnnnnnnnnnnnnnnnnnnnnnnnnnnnnnnnnnnnnnnnnnnnnnnnnnnnnnnnnnnnnnnnnnnnnnnnnnnnnnnnnnnnnnnnnnnnnnnnnnnnnnnnnnnnnnnnnnnnnnnnnnnnnnnnnnnnnnnnnnnnnnnnnnnnnnnnnnnnnnnnnnnnnnnnnnnnnnnnnnnnnnnnnnnnnnnnnnnnnnnnnnnnnnnnnnnnnnnnnnnnnnnnnnnnnnnnnnnnnnnnnnnnnnnnnnnnnnnnnnnnnnnnnnnnnnnnnnnnnnnnnnnnnnnnnnnnnnnnnnnnnnnnnnnnnnnnnnnnnnnnnnnnnnnnnnnnnnnnnnnnnnnnnnnnnnnnnnnnnnnnnnnnnnnnnnnnnnnnnnnnnnnnnnnnnnnnnnnnnnnnnnnnnnnnnnnnnnnnnnnnnnnnnnnnnnnnnnnnnnnnnnnnnnnnnnnnnnnnnnnnnnnnnnnnnnnnnnnnnnnnnnnnnnnnnnnnnnnnnnnnnnnnnnnnnnnnnnnnnnnnnnnnnnnnnnnnnnnnnnnnnnnnnnnnnnnnnnnnnnnnnnnnnnnnnnnnnnnnnnnnnnnnnnnnnnnnnnnnnnnnnnnnnnnnnnnnnnnnnnnnnnnnnnnnnnnnnnnnnnnnnnnnnnnnnnnnnnnnnnnnnnnnnnnnnnnnnnnnnnnnnnnnnnnnnnnnnnnnnnnnnnnnnnnnnnnnnnnnnnnnnnnnnnnnnnnnnnnnnnnnnnnnnnnnnnnnnnnnnnnnnnnnnnnnnnnnnnnnnnnnnnnnnnnnnnnnnnnnnnnnnnnnnnnnnnnnnnnnnnnnnnnnnnnnnnnnnnnnnnnnnnnnnnnnnnnnnnnnnnnnnnnnnnnnnnnnnnnnnnnnnnnnnnnnnnnnnnnnnnnnnnnnnnnnnnnnnnnnnnnnnnnnnnnnnnnnnnnnnnnnnnnnnnnnnnnnnnnnnnnnnnnnnnnnnnnnnnnnnnnnnnnnnnnnnnnnnnnnnnnnnnnnnnnnnnnnnnnnnnnnnnnnnnnnnnnnnnnnnnnnnnnnnnnnnnnnnnnnnnnnnnnnnnnnnnnnnnnnnnnnnnnnnnnnnnnnnnnnnnnnnnnnnnnnnnnnnnnnnnnnnnnnnnnnnnnnnnnnnnnnnnnnnnnnnnnnnnnnnnnnnnnnnnnnnnnnnnnnnnnnnnnnnnnnnnnnnnnnnnnnnnnnnnnnnnnnnnnnnnnnnnnnnnnnnnnnnnnnnnnnnnnnnnnnnnnnnnnnnnnnnnnnnnnnnnnnnnnnnnnnnnnnnnnnnnnnnnnnnnnnnnnnnnnnnnnnnnnnnnnnnnnnnnnnnnnnnnnnnnnnnnnnnnnnnnnnnnnnnnnnnnnnnnnnnnnnnnnnnnnnnnnnnnnnnnnnnnnnnnnnnnnnnnnnnnnnnnnnnnnnnnnnnnnnnnnnnnnnnnnnnnnnnnnnnnnnnnnnnnnnnnnnnnnnnnnnnnnnnnnnnnnnnnnnnnnnnnnnnnnnnnnnnnnnnnnnnnnnnnnnnnnnnnnnnnnnnnnnnnnnnnnnnnnnnnnnnnnnnnnnnnnnnnnnnnnnnnnnnnnnnnnnnnnnnnnnnnnnnnnnnnnnnnnnnnnnnnnnnnnnnnnnnnnnnnnnnnnnnnnnnnnnnnnnnnnnnnnnnnnnnnnnnnnnnnnnnnnnnnnnnnnnnnnnnnnnnnnnnnnnnnnnnnnnnnnnnnnnnnnnnnnnnnnnnnnnnnnnnnnnnnnnnnnnnnnnnnnnnnnnnnnnnnnnnnnnnnnnnnnnnnnnnnnnnnnnnnnnnnnnnnnnnnnnnnnnnnnnnnnnnnnnnnnnnnnnnnnnnnnnnnnnnnnnnnnnnnnnnnnnnnnnnnnnnnnnnnnnnnnnnnnnnnnnnnnnnnnnnnnnnnnnnnnnnnnnnnnnnnnnnnnnnnnnnnnnnnnnnnnnnnnnnnnnnnnnnnnnnnnnnnnnnnnnnnnnnnnnnnnnnnnnnnnnnnnnnnnnnnnnnnnnnnnnnnnnnnnnnnnnnnnnnnnnnnnnnnnnnnnnnnnnnnnnnnnnnnnnnnnnnnnnnnnnnnnnnnnnnnnnnnnnnnnnnnnnnnnnnnnnnnnnnnnnnnnnnnnnnnnnnnnnnnnnnnnnnnnnnnnnnnnnnnnnnnnnnnnnnnnnnnnnnnnnnnnnnnnnnnnnnnnnnnnnnnnnnnnnnnnnnnnnnnnnnnnnnnnnnnnnnnnnnnnnnnnnnnnnnnnnnnnnnnnnnnnnnnnnnnnnnnnnnnnnnnnnnnnnnnnnnnnnnnnnnnnnnnnnnnnnnnnnnnnnnnnnnnnnnnnnnnnnnnnnnnnnnnnnnnnnnnnnnnnnnnnnnnnnnnnnnnnnnnnnnnnnnnnnnnnnnnnnnnnnnnnnnnnnnnnnnnnnnnnnnnnnnnnnnnnnnnnnnnnnnnnnnnnnnnnnnnnnnnnnnnnnnnnnnnnnnnnnnnnnnnnnnnnnnnnnnnnnnnnnnnnnnnnnnnnnnnnnnnnnnnnnnnnnnnnnnnnnnnnnnnnnnnnnnnnnnnnnnnnnnnnnnnnnnnnnnnnnnnnnnnnnnnnnnnnnnnnnnnnnnnnnnnnnnnnnnnnnnnnnnnnnnnnnnnnnnnnnnnnnnnnnnnnnnnnnnnnnnnnnnnnnnnnnnnnnnnnnnnnnnnnnnnnnnnnnnnnnnnnnnnnnnnnnnnnnnnnnnnnnnnnnnnnnnnnnnnnnnnnnnnnnnnnnnnnnnnnnnnnnnnnnnnnnnnnnnnnnnnnnnnnnnnnnnnnnnnnnnnnnnnnnnnnnnnnnnnnnnnnnnnnnnnnnnnnnnnnnnnnnnnnnnnnnnnnnnnnnnnnnnnnnnnnnnnnnnnnnnnnnnnnnnnnnnnnnnnnnnnnnnnnnnnnnnnnnnnnnnnnnnnnnnnnnnnnnnnnnnnnnnnnnnnnnnnnnnnnnnnnnnnnnnnnnnnnnnnnnnnnnnnnnnnnnnnnnnnnnnnnnnnnnnnnnnnnnnnnnnnnnncaatagtattagatggcacaaaagacaaaaaaattatcaataagatctctttgtgccgtttgatttgaagctcagtgcaatgaagtgaacttttgcgtgatatgatcaaaaagcacacaaaaaatcatgcataactgttcagcaccaacatcagaataacaaagagaacaaaaacttttttggtgtctgctgtttgtccgtgttcagggtaggggatcagaatttagaaccataatgacttccattagaaagaaaacaacaaacatattacttttatgaccaacattgcctttgaaaaggtatttacgattaacagacaagaacagtgaatatcttttacggcttctcgtgttgaatctgttctacagtcaaggttggtaacaaagccacagcctcaccatcaatcacaagaaggtcatcattcttgaaacaccttgtcttaaactttgcactgaatagtattgagaaacattcatttagcaacaaaattactccttgtttaaaaaagaatgcacaataataacagcaggactaaacttacagatatcgatttttattttctctcagattagttgcttgcacttcaccaataatctgatctccaatatagactgggaacttaaaattcaagttttgagatacatacacagctccaggctgcaattattgaaaattgaagtggccagggaagaagaggaatttaagaaagttatcacagaatgagaatatttcaatgaatgacttcatagtattgcctcaattcccatcactaagcactttaaaatcaagtcttttattcaagttgaccaaatccaatgacaagtaccaatttttcaagcagtagaactagaacccgtgttagcatttaaattgaccacttaatagcatgttggtgatttgcattttccaaccacatccaaaaccaaattcacgtcaagtatgccaagttaatgtggaagctaaaaaaatttacttcaaaaggacgcggatcacactgacataacgccaatccagacacacgataagtcctttatccatgtttttattttcatgtctttcagaaatactataaaatttaagctttttacatgtgtctccctttctacttctgattaatcatgacacattttaatctatgcaataagtgaggggtcacttgaccttatttcacactccttatagtggagattacaatttcacatcttatccgtcttcattttatgatactctatctcatgtcataattttccattatggtgtctaatactcaagtttacagaaaggatgttcatgggggcaaggggatttggacccggaatcaacttagagttccccaaagctgctgactgtggcagaaatctcacacttacaaaaagcacaaacaaattaacttttacatgtaaaaatgtatgctacagagtacagagtatacaattcagtctagaaaactaataatagaactctactaatttatctgtttattcacattaatttaatattgagatgagaacgttaactatctcattttaggaggcatatcaaaatttaaagagagggtaagtatgaaacttacaaaatgtgatgagatgatatgaggaaagagagaagccacaagcatcccatgtaccagtggaccttcaaatccaacatctttggcagcagcagaatcagtatgcaaaggattagaatcacaactcaccttggagtattggagaacatcttcctcagtataaacccttgcttttctcaagacatccccaggcttaattacattaggagttgcagaagtaaagcaccttaggctcagagaatggactttgtgacaatgtaaatttcttatgagcatttttgcaagggttcaaatcaacaaaacaaggccctgatgtggtcccccactaactgtaaatcaagtaaagtgcaacttaatattcccacaactggtagatgaggtttcttgaggtaactggtggcatggacttaggtcaaacagctggtgggcgtttgagcagcacgggaaacagtgtacattggtcaatggtatgggttcattgctcttggagggatattaacacaagcagaattatagggtgctgttgtcaagggattattggtctcatgcactacgtttgtcaaaaactgataagttttatggagcctagtttttttacggatcaggattcaacgaaacggaaagatgcaccacacaggtaaataagaaaaaataaggaattacttttaaatttttacaaaataaataaattttttttaatttttttttcatttttagaggttgagtatatgtatatccaacttattttatgtcaatgtaactcttcacgtcatcaatttttttcttgcatgatcctgtattcctgtatcaatggttgtcaataaataactaatttacttgcatgatcctgtattcctgtctgtattaaaataatataaaaaatttataatcactattataatgattaaggtgacaattataataaaattttgaaaaattaattgtgtttgttatttttatgataatggttaaaattattatcatttaaataaagaatagttctaattttatgtgaaaaaataataattttttaaatattattacttattaaaaattagacatttatataattacaaagaatttttttaactctnnnnnnnnnnnnnnnnnnnnnnnnnnnnnnnnnnnnnnnnnnnnnnnnnnnnnnnnnnnnnnnnnnnnnnnnnnnnnnnnnnnnnnnnnnnnnnnnnnnnnnnnnnnnnnnnnnnnnnnnnnnnnnnnnnnnnnnnnnnnnnnnnnnnnnnnnnnnnnnnnnnnnnnnnnnnnnnnnnnnnnnnnnnnnnnnnnnnnnnnnnnnnnnnnnnnnnnnnnnnnnnnnnnnnnnnnnnnnnnnnnnnnnnnnnnnnnnnnnnnnnnnnnnnnnnnnnnnnnnnnnnnnnnnnnnnnnnnnnnnnnnnnnnnnnnnnnnnnnnnnnnnnnnnnnnnnnnnnnnnnnnnnnnnnnnnnnnnnnnnnnnnnnnnnnnnnnnnnnnnnnnnnnnnnnnnnnnnnnnnnnnnnnnnnnnnnnnnnnnnnnnnnnnnnnnnnnnnnnnnnnnnnnnnnnnnnnnnnnnnnnnnnnnnnnnnnnnnnnnnnnnnnnnnnnnnnnnnnnnnnnnnnnnnnnnnnnnnnnnnnnnnnnnnnnnnnnnnnnnnnnnnnnnnnnnnnnnnnnnnnnnnnnnnnnnnnnnnnnnnnnnnnnnnnnnnnnnnnnnnnnnnnnnnnnnnnnnnnnnnnnnnnnnnnnnnnnnnnnnnnnnnnnnnnnnnnnnnnnnnnnnnnnnnnnnnnnnnnnnnnnnnnnnnnnnnnnnnnnnnnnnnnnnnnnnnnnnnnnnnnnnnnnnnnnnnnnnnnnnnnnnnnnnnnnnnnnnnnnnnnnnnnnnnnnnnnnnnnnnnnnnnnnnnnnnnnnnnnnnnnnnnnnnnnnnnnnnnnnnnnnnnnnnnnnnnnnnnnnnnnnnnnnnnnnnnnnnnnnnnnnnnnnnnnnnnnnnnnnnnnnnnnnnnnnnnnnnnnnnnnnnnnnnnnnnnnnnnnnnnnnnnnnnnnnnnnnnnnnnnnnnnnnnnnnnnnnnnnnnnnnnnnnnnnnnnnnnnnnnnnnnnnnnnnnnnnnnnnnnnnnnnnnnnnnnnnnnnnnnnnnnnnnnnnnnnnnnnnnnnnnnnnnnnnnnnnnnnnnnnnnnnnnnnnnnnnnnnnnnnnnnnnnnnnnnnnnnnnnnnnnnnnnnnnnnnnnnnnnnnnnnnnnnnnnnnnnnnnnnnnnnnnnnnnnnnnnnnnnnnnnnnnnnnnnnnnnnnnnnnnnnnnnnnnnnnnnnnnnnnnnnnnnnnnnnnnnnnnnnnnnnnnnnnnnnnnnnnnnnnnnnnnnnnnnnnnnnnnnnnnnnnnnnnnnnnnnnnnnnnnnnnnnnnnnnnnnnnnnnnnnnnnnnnnnnnnnnnnnnnnnnnnnnnnnnnnnnnnnnnnnnnnnnnnnnnnnnnnnnnnnnnnnnnnnnnnnnnnnnnnnnnnnnnnnnnnnnnnnnnnnnnnnnnnnnnnnnnnnnnnnnnnnnnnnnnnnnnnnnnnnnnnnnnnnnnnnnnnnnnnnnnnnnnnnnnnnnnnnnnnnnnnnnnnnnnnnnnnnnnnnnnnnnnnnnnnnnnnnnnnnnnnnnnnnnnnnnnnnnnnnnnnnnnnnnnnnnnnnnnnnnnnnnnnnnnnnnnnnnnnnnnnnnnnnnnnnnnnnnnnnnnnnnnnnnnnnnnnnnnnnnnnnnnnnnnnnnnnnnnnnnnnnnnnnnnnnnnnnnnnnnnnnnnnnnnnnnnnnnnnnnnnnnnnnnnnnnnnnnnnnnnnnnnnnnnnnnnnnnnnnnnnnnnnnnnnnnnnnnnnnnnnnnnnnnnnnnnnnnnnnnnnnnnnnnnnnnnnnnnnnnnnnnnnnnnnnnnnnnnnnnnnnnnnnnnnnnnnnnnnnnnnnnnnnnnnnnnnnnnnnnnnnnnnnnnnnnnnnnnnnnnaataacttgctatgtaaatcttaattatgcttttctctgttcatatgtttttgaagatttagactttaaagtgcacctttaaaactatcttttctgggattgatttttctggtgtattgtagtatttagtttcaacatcagttgaaaagtatgtctaattttcatgattaatgaagctgtggaaggttcaaattgtaataagagaaccatgatccttgatcttaatttgtttatgtccctattcatctcctaaattgtgatctccatcacaaaagatcctacattctattagataaatacttgaatgcataaccactagggtcaatctagtgacagagatttaaggtaatatgcataagatcataagtttgaacatatcattgtaaaaaaaaaaaaagataaatacttatatgtaaacgcccatgccatgattccaccatacagggaaatttttgtcttgtcatactttcttatctgggttgcctgtgtctgaatgcttccttttttgtgatattgggctcttaaattctaacctttttttttgtatttaagcaatcttattcttttgttcagttagatcatttaattgacaatatgttgtgtggatgcatccttattgcaggatgcagcttgagggtcggcctggggcagggtcaacatggcgtctattcagggtctaaaattttttgtctggctactttaagtaaaaaaaaaaattttaaaaataaaatatatgttaggggtttattttatgtgttagaggcccattttttctatctcttagttttaatattatttgtatttcaaaaaatttgtgtgtcaggggtccattttttcattccttagttttaatattatttgtatttcaaaaaatttatgtattaggggtccattttttgtgtgttagaggtccatttttccatcccttagttttaatattaattgtatttcaaaaaaattgtgtattaagggctcattttttccatctcttaattttaatattatttgtatttcaaaaaatttgtgtgttaggagacatgtttgtgccttctatgtataatgaatttaagaaattagctaaggaagatgctgcggctaattataattatggtatagagtgccttttcagattttacaggtaccaattccaattctgtcttttctcatttgtttgagaagatagaaccatcatttagatttcatcttctggtctattttgtcgagtaaagtaataggctaaagtcttctgaattttcatctattgtttctttggagaagctgattaaattgctttatgttctctatttttatttttatttttctttagaagacatccaagcatagttcttctaatttttgaatgatttcttgctcagttatggattggagaaggaatttagagatgatttatacgatgattttggacaactcactatggatttctaccataagggcaatctgtatggcctggaaaaatattggtaaaaaaccaaattctcttgcttcttatattctgctgcatattttctgttttgtagtttcattccttttcccaatttcatgtgagatttgttatagtgaaaaaagtaaacatattggttggttagtgtataacctaagttgtattctagattaaaaagattgttcactggtctatgaaatctaattatacagcaccttagttatatttgattatttcctgtttgtctgacttgtttgtgtcacaaaatctttataacatagtttctgactnnnnnnnnnnnnnnnnnnnnnnnnnnnnnnnnnnnnnnnnnnnnnnnnnnnnnnnnnnnnnnnnnnnnnnnnnnnnnnnnnnnnnnnnnnnnnnnnnnnnnnnnnnnnnnnnnnnnnnnnnnnnnnnnnnnnnnnnnnnnnnnnnnnnnnnnnnnnnnnnnnnnnnnnnnnnnnnnnnnnnnnnnnnnnnnnnnnnnnnnnnnnnnnnnnnnnnnnnnnnnnnnnnnnnnnnnnnnnnnnnnnnnnnnnnnnnnnnnnnnnnnnnnnnnnnnnnnnnnnnnnnnnnnnnnnnnnnnnnnnnnnnnnnnnnnnnnnnnnnnnnnnnnnnnnnnnnnnnnnnnnnnnnnnnnnnnnnnnnnnnnnnnnnnnnnnnnnnnnnnnnnnnnnnnnnnnnnnnnnnnnnnnnnnnnnnnnnnnnnnnnnnnnnnnnnnnnnnnnnnnnnnnnnnnnnnnnnnnnnnnnnnnnnnnnnnnnnnnnnnnnnnnnnnnnnnnnnnnnnnnnnnnnnnnnnnnnnnnnnnnnnnnnnnnnnnnnnnnnnnnnnnnnnnnnnnnnnnnnnnnnnnnnnnnnnnnataataataataataataataataataaataaataaataaataaataaataaaagtatctagtacaccaaaaaaaagtatccaaatttattcacatacaattttaaaaacataaatacaaaaaaataaagtattgaatattgcaaaaaaggaaccataatttattgacaaaaaaaattaataaataatatgttgatcggataaaaaaaatgtaatatattgagagattaaatctttataaaatatatcatgattaaaattacgggaaagataagcataatcaaataaataaaacataaatctaacattaagaaaaaattgaaaaggaagatctacaaaaattgggttcctctgcaaaatatataaaggtgtggtatagatacctcgtcaaagtgcaatacttggttcccaagaaataagacagcgtctatagcaattttaaattgatcacaaaagttttcataaagatggagtggtgcgatcattgttgcaggttttgtcaaacaagagtggaaaacatcatcgatgaatcttcaggcaaatattgcaggtgaagtatatatattactagtgttgttcctatttcctttcctcttaaggtttttggggaaaactattattatattttcacgccattaatgatttttaatgtcttgtattttgcagctcttgcaccatgtgtgggaagattttattagacttgggtagtaatcctagaagaataaagaaaaggagatagagcaatgtaaaaattgtgaaaaaagaacgtgtaagtactcttagtcttggttcttttttttttttgttaattaatattttnnnnnnnnnnnnnnnnnnnnnnnnnnnnnnnnnnnnnnnnnnnnnnnnnnnnnnnnnnnnnnnnnnnnnnnnnnnnnnnnnnnnnnnnnnnnnnnnnnnnnnnnnnnnnnnnnnnnnnnnnnnnnnnnnnnnnnnnnnnnnnnnnnnnnnnnnnnnnnnnnnnnnnnnnnnnnnnnnnnnnnnnnnnnnnnnnnnnnnnnnnnnnnnnnnnnnnnnnnnnnnnnnnnnnnnnnnnnnnnnnnnnnnnnnnnnnnnnnnnnnnnnnnnnnnnnnnnnnnnnnnnnnnnnnnnnnnnnnnnnnnnnnnnnnnnnnnnnnnnnnnnnnnnnnnnnnnnnnnnnnnnnnnnnnnnnnnnnnnnnnnnnnnnnnnnnnnnnnnnnnnnnnnnnnnnnnnnnnnnnnnnnnnnnnnnnnnnnnnnnnnnnnnnnnnnnnnnnnnnnnnnnnnnnnnnnnnnnnnnnnnnnnnnnnnnnnnnnnnnnnnnnnnnnnnnnnnnnnnnnnnnnnnnnnnnnnnnnnnnnnnnnnnnnnnnnnnnnnnnnnnnnnnnnnnnnnnnnnnnnnnnnnnnnnnnnnnnnnnnnnnnnnnnnnnnnnnnnnnnnnnnnnnnnnnnnnnnnnnnnnnnnnnnnnnnnnnnnnnnnnnnnnnnnnnnnnnnnnnnnnnnnnnnnnnnnnnnnnnnnnnnnnnnnnnnnnnnnnnnnnnnnnnnnnnnnnnnnnnnnnnnnnnnnnnnnnnnnnnnnnnnnnnnnnnnnnnnnnnnnnnnnnnnnnnnnnnnnnnnnnnnnnnnnnnnnnnnnnnnnnnnnnnnnnnnnnnnnnnnnnnnnnnnnnnnnnnnnnnnnnnnnnnnnnnnnnnnnnnnnnnnnnnnnnnnnnnnnnnnnnnnnnnnnnnnnnnnnnnnnnnnnnnnnnnnnnnnnnnnnnnnnnnnnnnnnnnnnnnnnnnnnnnnnnnnnnnnnnnnnnnnnnnnnnnnnnnnnnnnnnnnnnnnnnnnnnnnnnnnnnnnnnnnnnnnnnnnnnnnnnnnnnnnnnnnnnnnnnnnnnnnnnnnnnnnnnnnnnnnnnnnnnnnnnnnnnnnnnnnnnnnnnnnnnnnnnnnnnnnnnnnnnnnnnnnnnnnnnnnnnnnnnnnnnnnnnnnnnnnnnnnnnnnnnnnnnnnnnnnnnnnnnnnnnnnnnnnnnnnnnnnnnnnnnnnnnnnnnnnnnnnnnnnnnnnnnnnnnnnnnnnnnnnnnnnnnnnnnnnnnnnnnnnnnnnnnnnnnnnnnnnnnnnaattattggactgaaatggagcattttgtttattcttgatggtagatttgtggaacagtatgagcagttctaaatgttaacactactcacctatgcttagctaatccaaaatagatcatcatattggaaatatgttagtttctatgtcaaatgctagcatactattttattaatattgcatttctatatttttgggtgaatggaggttgccatattctaaggcaaggcactgtctccctcatatctgttggatatagagaaatgtagttttcttctgttgttttggcactcctcttcaccatattatcactctctagaacttttgttcttacatatttatatttatatttatggcattggtagggcatttcgtcattaccgcaaggtctgtggccagaaagaaccgttgaatcaacaccctgaactggacaggttgctttgagaagagtatcctagattggaggatttccgtgccaaagaaaagagtatggtaaaagaggatgtcaattaagttgagtgatatgtccaaatggtaaatacatatggcagagttttgatggcatccccaattttgatgagaactcttaacaacataacaatgagttgttgtggagtagcggcctactttttgaaagaagattgtttgtttcttctctatatttggttgagttgattatggctcatcaagaggattgctgatagccaagtcttttcaggtttctttgatggatcattctatatggtatataccactgcatcctttctttggtgaatcttgcaaacattgagagacacattttcttttctccaaatgttgtacataagttgatagactagaagttgtgacattacagcataagaaaaagaggttcttgtttttatttttggtgggggttaaaagggggaaaagggttgtacttatatctttgccaaatttgaacaataagagtgagaatcttcttactttgtaacttggcgtgctcatttaatttatatgtaacaattattttcttaccaaattgttattggtatggtttataaagcaaaatgtttttggtacaactaaaatgggactagttgtctcctttaattttgggagagtatttttggaatgattgtctgtgaaaaagataaaagtcaaggtaaaacaattatatgcggtgtaagatgaaatgaatttaaattatttgatgtttcttcatcatcatcaacatcacatttaacctaagttaattagaatcggtggtagatgaactcaatattagatatgaaaaagttaaaaaaaatgctaagaaaaagaagaaatgagacaagagaaaagaaaaaattatttgatgtttcttgataaaaaaaaatattagttaatgtttatagcaagtaaaattagtcactgaaatggagatattcatgacagaaccaaaaaattatttaatgttcaagtaatggaatcgagtttaaaagctgaaaacatagttttggtggttgtcaagcctgtttagcatcatcgcagccaatgaaaacatgtcagtcagtttccaaattttatgaacggtaagaacaaagatgaataaatgactctaaaaaacccatataagcactttccattggaaatgctcttattaccctatatcaagtattattgtttcttaatttattgagtgctctttttaaaacaaaatcattattttgaaaaataaaaatattattttctaaattatgattgcacaaaatacaagaacatcattgaaatgagaaaatcatatatttaaataacttttttatatatttttaaatttttatatttcagaattttcttaacattttaatttgaggtcaaatttgaattcttaattataacaatatattattagatacattttaagataatttgatgttattgaattctgtttcaataatttactttttatgttctaaaaatattgatacacaataatataggctattttgagtatttttttttcttttgtaattaatacttaagtttctttgatttggtaattatcttataaactactttgctatacaagtttattttagtgacttattttcataaattatttgaagtagtttataaaagataaattagcttatattttaattttaatttctctcttaattttatccttattattttatttgacattcggttttactctttcattcaatttaaaaaatcatctttttgttgtttagaaaaaaaaatcctattatctaatttatcatttttactaggcatgataacgaggacggattttgcattccccatccccgccctctactctaaaaccgctctccgattcctattgggattaaaaatatataccccatcccggatggggtcgattttccccgtctcgatccaccctcgctaattaattaaaattaaaaaaattagaaaaataatataacttttgttattgaaaaaatgggcctaaaatgctagtttcataacaaaaaaataataataaattcacattcaaaatatgagaatgagatcataattaaaaattacaaaaccaaatcaattaatttaattaaaatcataaaatatagttattgcataaaataaggacatgcatatttaatttttcacaaaatacgatatcatttaaatatatattgtccaaaaattaagtaacacatcatatgattaagtatcacatccttcaaattacataataaaataagaaacaacttaaatataatttttttaatgttatttattacggggcgggttcaggacgtatatcagttatcccataccaccctgttttaattaacaaggaaaatccgaccctgaccccgaacctgatcgacttgatttttcccgtcaaagtcggggagagttcgatccgatccccatgtggtcggattccgctgtcatgcctaataccaaatcatgtttttccctctctattttttagtaatattggtgactttttaatatttcatttatcttttaaataaattctaaaatatattttgtttaaaaattaaaaaaatcaatcaaattacttaattaaatcaatctaatttttttggattgataaattttgaaatatctcaaaaatcttattgtattcaatcatttgaaatattttaattggtttaaatctattttttttgtcaactttgagattttcaaataaaaataggtgaatattgaataatgcagtgcatttatttaaataacagtgtaagggtaggaaggaaatcaactttggtcgactcgattttgaaagatttgtgactaatctgttaattgaaatataagagttaattttagtttaattatattatataaattattttaaaatttagtttaagtcttatacttcttaaaaaattatttaaaatctcactttttagtgataatattaacaaataatgtaacgacctaaatatttacttatttttatctttccttaagggtaatctataagaaacgtataatagtaaaatttttaaaacgtaaaatttgcaaaagatttgttactcatatacatagctaatgtctctgatacaaaagtttatataatacaagtacactacttttctcaaaaatccagcgtaattcataacttcttttatatatatcttcactactccaaggcctcatggaacctgttcatcattgccatctaaaaaaaaaacatgaaacaaatagggtgagaaataaatttctcagtaggcaaagctaaatcccgatcctattattaggttagtaaaatcattcaaataatcaaacacatccacaagtaatatgcaactatatgaatgcatgagatgaactatcccagggcaaatggcctccacatatcgtactgtatgtggccacactgagtgtggacgctgctatagtcttacgcaaacatgcatgaattttgccatatatccttgcacctgggtactacatatcgtactgtatgtagtatcagattctgtttccccaaagcctcgtactggacttggaacatgaaaacatgaatccacctatcttaatcacatcaacatatcaacatccataaagatcaaattcataagcaaaatatatatcatatcattatttatatcataagtatggttacgccaccatatcttatccattaagcttatgagtatggttacaccaccataccttaatcaagtaagattattaccaacttatgcataaccagagaataacctgaataaccttaatctacagaaaaattatgttagtaatctaactaataatcctcaatataaataatatctaatttctttaaacttttgcaagcaaagattcgcacttagtatacatattaattaatcctcaaaatcaaataattaatcctcaaaatcaaatcatcaaatatttaaaccattcaactccacaccattcatcttctacttcaaaatttaaatcaaaaacatatccataaaatatacacagaccgtccaaagtatcattaaaattacctcaaaagatcatcaaatggacttccttacttcactaatattgatgggtataaatcatagcctatattataacttaaatcaacatattctcatcaaagagtaacctttaaacattacgaaattcaagcctaaatatcaaccataaatcagcctactaaaacatgtaaattaacctaaaccattgattaactagagatttaaacttcacctacctcaagtgagtttgattcttgaaattgaatggataaatgtctcccttccttccttccttccttgggagaatcctctatgagatgaagccttgatatccttttgctaagcttgtcaaaagttcttcctaaggttgctaggtttctcacgaaatttcttcaaggtgatgggtttgtttttcttacttgattcaagctttaaaagagaaagatggaatgaaatgaagatggtttagggagagagtggtcacgtgaatgagctaggagggatggcttggaatggtttgcacttaggtctcccttccccctttatatagtgttgaagaaatgattacttagagaaaaatctaataagtcatcattattcctttacaagtgtccctacacttgttataatcttaaggcttcttcctttcttccttccaagtgtcctaccacttggcatgatcttagagcttcttctcctttacttccaagtgtccaaaatcatgaagtttctccatttctcttgcattttcgtgaagtagcttgttcttgagtctatcccaaacctgttttagtaaaattctaattctggtctcattaaccgttggatcttcttgaaattttaaaggtacattactatcttacatatgtaacttttgaccgttgggatttttgaaataatgtttacaactgtccacgtgcaagacggaagagtgtagagaaatcttggcttgatttttgtattaccttgcatccatgccatacaagtgtcttgccacttgttttcatcctatggcttatcttccaagtggctgaattcaagaagcttcttcctcattctccatgcttctccacttgaatgacaagctcaaagggaaagaatacaaatttttcttcctttcatgctacatgtggtcatttttgatgatgaataaaaatctagtttcaatatggtattttcttaaaaagaaattcaagttattttgaattcttttgtctaaagaaaatgttgaatattagaattctagatgttcctaagaatttatcccaatgatagtttaaattaatcccaagcattcttatacagggcaatacataaacctttcatttttcactacatctttatcttatttttgattggtctatacttcttctgaccatcaaaattaataaaccattttattaaataggtatattcatcctataattaagagaaaattctatagattttatgtatcatttttccatatttttctgatgcttgagttttcttgaatacaacctcaaagttgtcatcttccaaaatttgtagaaattttattctagagttttgtgtcacaaaatatgttaatacttagtcagctaagtgtattttataatttcatcaagtttctacaaaatttctaaagttatttgagcatttttggcataggggcattttggtaattatgccattcaacctaggggtattttggttattttcaaaaatttgcaaggacatttttgtaattttcatcctaagggtattctagtaatttctacttcatggaaagagtgatttagtcatttttcttcaaatatacttgtatccaaacattatcacatttccacaagtgcttaataaaattttgaggatgttacaaataaaattatgaaattacttataaataagttaattaatataattatgtaaatttaaactttaataaattaataaacatatgatttgaaaagatgatgataaaatttatataataatatattatgtatattatttagagaaatgttaataatatattccctaacatactatttataacaaatatgtaatattagttaaaatttattaaaaactataaaattgagaaaaagtttttaaataagaagtaggatcattaaaatttgtgatttctaataaattttaactaataataaatattgaatttaatattactttttaaaaatgtattactataatttctcatttatttggataagtaaatttattatgattaacaattttgaaatctttggataagcaactttgaaagaaaaaaaaataaatttcaaattttaaagaataatgagtgtcacttgggcgccaaattttagcgcgtcatgctttgttaaataagaagccctgtcaacggaaagaaagcaatttttgaagcttcaaactttgaaagccataaaagaagaaaacaatgtctgagttatataataacgattggaatgatgatgtttatgactacaatctgctttttgattgcgatgatatatggtcgacgctgaactttgctacccagattcctatggcggaggacacccaacaccaccacacaccgctgaacgttgcaaccctagttgcggaggacacccaacaccaccagacaccgctgaacgttgctacccaggttgcggaggacacccaacaccaccgcacaccactgaacgttgctaccctggttgcggaggacacccaacaccaccagacaccgctgaacgttgcaaccctagttgcggaggacacccaacaccaccagacaccgctgaacgttgcaaccctagttgcggaggacacccaacaccaccagacattacccaatcacgtgaaccagattgcgtgggctccggtcgagttgcccagccacccagttgaggcgctggtgcataacggtggtggttccatgatgcagaacgctggttcaccggttcggcgcaagcaagggagaaggaatacatggactgaagaagaacataggtatgtttttaatatattgtatagaaatcaaatgaatggaagtttctcgatttttcctctcatatttggtttttaatggcaggttgtttttacttgggctccaaaaacatgggaagggaaactggatagaaatatcaaggttggttaaaacaagatcccctactcaaattgccagtcatgcccaaaagtatttcattcgccaaaatgcctcacccatgcagaaaaaaagaaaaagcattcatgataaaaacttacattacacaaatggagttcctcacatcattgatccacaaaattcaattcctcttactggaattcaacaagttcacgaaatgcaacaaaaaaaacaaaagttgccgctgaatccaccaaatagcgtgactcatcaaatgagtggatttgattctgcatatcaacaagttcatgaaaatcaacaaatattgcatgtgaattcatcaaacagcccgactcttcaacttagtggatttgaatatggtgatgaccacattggaatacaaggcttgctggaagctgtactatctgtaatattttcaccgtagtatgattctttaatcccagcatacgttgtggtctggtgtaaggtgtaagagtagtgaacttatcaagtaattagggattttgatatttgtacatggattagatattggaattttctcatcaattactttcttttattgactttgatgtgcaggtcgtgaccaacttttagtaataatattacaatccatttcattcttaaaaggaaaagtaaacttgtattttttataataaattttaaagacttattcctcatctgatccaagatgaatagcacacatgcacttgacatattaccatactcgcggagcaaatgtctagtagcttccattttttcaggcttacactagtgccttttcgatattcttagagatgagtccaggaacatccttgaggggatggaatgtgagtccaacttggcgaaggtgaccatcaatagccccttcactgtatggaaggatggtgcaccatctccaaacaataaacccttgcttttctcaagacatccccaggcttaattacattaggagttgcagatgaagtaaagcaccttaggctcagagaatggactttgtgacaatgtaaatttcttatgagcatttttgcaagggttcaaatcaacaaaacaaggccctgatgtggtcccccactaactgtaaatcaagtaaagtgcaacttaatattcccacaactggtagatgaggtttcttgagttaactggtggcatggacttaggtcaaacagctggtgggcgtttgagcagcacgggaaacagtgtacattggtcaatggtatgggttcattgctcttggagggatattaacacaagcagaattatagggtgctgttgtcaagggattactggtctcatgcactatgtttgtcaaaatctgataagttttatggagcctagtttttttacggatcagaaagatgcaccacacaggtaaataagaaaaaataaggaattacttttaaatttttacaaaataaattaattttttttgtcatttttagaggttgagtatatgtatatccaacttattttaatttatgtcaatgtaactcttcacgtcatcaatttttttcttgcatgatcctgtattcctgtatcaatggttgtcaataaataactaatttacttgcatgatcctgtattcctgactgtattaaaataatataaaaaatttatacatttattaaaaagtttcaaaagaaatcactattataatgattaaggtgacaattataataaaattttgaaaaattgattatgtttgttatttttatgataatggttaaaattattatcatttaaataaaaaatagttttaattttatgtgaaaaaataataattttttaaatattattacttattaaaaattagacatttaaataattataaagaatttttttaactcttttaataagtttttgaatcgtctctggtcatcatgtgatatataaagtaatatttagaacttaacatacttggcaattaatagtacgagttttcctatccaaacaaatttaactatattgaaaaaattgaatcaaaaaattaaattattataaaaatatataaaaaaaatggaagggtgaaatattattaacaaaatacgttaacaaagaattagatttttttaattatttatgcatatcattcannnnnnnnnnnnnnnnnnnnnnnnnnnnnnnnnnnnnnnnnnnnnnnnnnnnnnnnnnnnnnnnnnnnnnnnnnnnnnnnnnnnnnnnnnnnnnnnnnnnnnnnnnnnnnnnnnnnnnnnnnnnnnnnnnnnnnnnnnnnnnnnnnnnnnnnnnnnnnnnnnnnnnnnnnnnnnnnnnnnnnnnnnnnnnnnnnnnnnnnnnnnnnnnnnnnnnnnnnnnnnnnnnnnnnnnnnnnnnnnnnnnnnnnnnnnnnnnnnnnnnnnnnnnnnnnnnnnnnnnnnnnnnnnnnnnnnnnnnnnnnnnnnnnnnnnnnnnnnnnnnnnnnnnnnnnnnnnnnnnnnnnnnnnnnnnnnnnnnnnnnnnnnnnnnnnnnnnnnnnnnnnnnnnnnnnnnnnnnnnnnnnnnnnnnnnnnnnnnnnnnnnnnnnnnnnnnnnnnnnnnnnnnnnnnnnnnnnnnnnnnnnnnnnnnnnnnnnnnnnnnnnnnnnnnnnnnnnnnnnnnnnnnnnnnnnnnnnnnnnnnnnnnnnnnnnnnnnnnnnnnnnnnnnnnnnnnnnnnnnnnnnnnnnnnnnnnnnnnnnnnnnnnnnnnnnnnnnnnnnnnnnnnnnnnnnnnnnnnnnnnnnnnnnnnnnnttcatgtaatcttaaataataataataataataataataataataataaataaataaataaaagtatccagcacacaaaaaaaaagtatccaaatttattcacatacaattttaaaaacataaatacaaaaaaataaagtattgaatattgcaaaaaaggaaccataaattattgacaaaaaaaaattaatagataatatgttgagcggataaaaaaaatgtaatatattgagagattaaatctttataaaatatatcatgattaaaattacgggaaagataagcataatcaaataaataaaacataaatctaacattaagaaaaaattgaaaaggatgatctacaaaaattgggttcctctgcaaaatatataacagtgtggtatagatacctcgtcaaagtgcaatacttggttcccaagaaataagacagtgtctatagcaattttaaattgatcacaaaagttttcataaagatggagtggtgcgatcattgttgcaggttttgtcaaacaagagtggaaaacatcatcgatgaatcttcaggcaaatattgcaggtgaagtatatatattactagtgttgttcctattttctttcctcttaaggtttttgggggaaactattattatattttcacgccattaatgatttttaatgtcttgtattttgcagctcttgcaccatgtgtgggaagattttattagacttgggtagtaatcctagaagaataaagaaaaggagaaagagcaatgtaaaaattgtgaaaaaagaacgtgtaagtactcttagtcttggttctttttttttttgttaattaatattttgaaaataacttgctatgtaaatcttaattatgcttttctctgttcatatgtttttgaagatttagactttaaagtgcacctttaaaactatcttttctgggattgatttttctggtgtattgtagtatttnnnnnnnnnnnnnnnnnnnnnnnnnnnnnnnnnnnnnnnnnnnnnnnnnnnnnnnnnnnnnnnnnnnnnnnnnnnnnnnnnnnnnnnnnnnnnnnnnnnnnnnnnnnnnnnnnnnnnnnnnnnnnnnnnnnnnnnnnnnnnnnnnnnnnnnnnnnnnnnnnnnnnnnnnnnnnnnnnnnnnnnnnnnnnnnnnnnnnnnnnnnnnnnnnnnnnnnnnnnnnnnnnnnnnnnnnnnnnnnnnnnnnnnnnnnnnnnnnnnnnnnnnnnnnnnnnnnnnnnnnnnnnnnnnnnnnnnnnnnnnnnnnnnnnnnnnnnnnnnnnnnnnnnnnnnnnnnnnnnnnnnnnnnnnnnnnnnnnnnnnnnnnnnnnnnnnnnnnnnnnnnnnnnnnnnnnnnnnnnnnnnnnnnnnnnnnnnnnnnnnnnnnnnnnnnnnnnnnnnnnnnnnnnnnnnnnnnnnnnnnnnnnnnnnnnnnnnnnnnnnnnnnnnnnnnnnnnnnnnnnnnnnnnnnnnnnnnnnnnnnnnnnnnnnnnnnnnnnnnnnnnnnnnnnnnnnnnnnnnnnnnnnnnnnnnnnnnnnnnnnnnnnnnnnnnnnnnnnnnnnnnnnnnnnnnnnnnnnnnnnnnnnnnnnnnnnnnnnnnnnnnnnnnnnnnnnnnnnnnnnnnnnnnnnnnnnnnnnnnnnnnnnnnnnnnnnnnnnnnnnnnnnnnnnnnnnnnnnnnnnnnnnnnnnnnnnnnnnnnnnnnnnnnnnnnnnnnnnnnnnnnnnnnnnnnnnnnnnnnnnnnnnnnnnnnnnnnnnnnnnnnnnnnnnnnnnnnnnnnnnnnnnnnnnnnnnnnnnnnnnnnnnnnnnnnnnnnnnnnnnnnnnnnnnnnnnnnnnnnnnnnnnnnnnnnnnnnnnnnnnnnnnnnnnnnnnnnnnnnnnnnnnnnnnnnnnnnnnnnnnnnnnnnnnnnnnnnnnnnnnnnnnnnnnnnnnnnnnnnnnnnnnnnnnnnnnnnnnnnnnnnnnnnnnnnnnnnnnnnnnnnnnnnnnnnnnnnnnnnnnnnnnnnnnnnnnnnnnnnnnnnnnnnnnnnnnnnnnnnnnnnnnnnnnnnnnnnnnnnnnnnnnnnnnnnnnnnnnnnnnnnnnnnnnnnnnnnnnnnnnnnnnnnnnnnnnnnnnnnnnnnnnnnnnnnnnnnnnnnnnnnnnnnnnnnnnnnnnnnnnnnnnnnnnnnnnnnnnnnnnnnnnnnnnnnnnnnnnnnnnnnnnnnnnnnnnnnnnnnnnnnnnnnnnnnnnnnnnnnnnnnnnnnnnnnnnnnnnnnnnnnnnnnnnnnnnnnnnnnnnnnnnnnnnnnnnnnnnnnnnnnnnnnnnnnnnnnnnnnnnnnnnnnnnnnnnnnnnnnnnnnnnnnnnnnnnnnnnnnnnnnnnnnnnnnnnnnnnnnnnnnnnnnnnnnnnnnnnnnnnnnnnnnnnnnnnnnnnnnnnnnnnnnnnnnnnnnnnnnnnnnnnnnnnnnnnnnnnnnnnnnnnnnnnnnnnnnnnnnnnnnnnnnnnnnnnnnnnnnnnnnnnnnnnnnnnnnnnnnnnnnnnnnnnnnnnnnnnnnnnnnnnnnnnnnnnnnnnnnnnnnnnnnnnnnnnnnnnnnnnnnnnnnnnnnnnnnnnnnnnnnnnnnnnnnnnnnnnnnnnnnnnnnnnnnnnnnnnnnnnnnnnnnnnnnnnnnnnnnnnnnnnnnnnnnnnnnnnnnnnnnnnnnnnnnnnnnnnnnnnnnnnnnnnnnnnnnnnnnnnnnnnnnnnnnnnnnnnnnnnnnnnnnnnnnnnnnnnnnnnnnnnnnnnnnnnnnnnnnnnnnnnnnnnnnnnnnnnnnnnnnnnnnnnnnnnnnnnnnnnnnnnnnnnnnnnnnnnnnnnnnnnnnnnnnnnnnnnnnnnnnnnnnnnnnnnnnnnnnnnnnnnnnnnnnnnnnnnnnnnnnnnnnnnnnnnnnnnnnnnnnnnnnnnnnnnnnnnnnnnnnnnnnnnnnnnnnnnnnnnnnnnnnnnnnnnnnnnnnnnnnnnnnnnnnnnnnnnnnnnnnnnnnnnnnnnnnnnnnnnnnnnnnnnnnnnnnnnnnnnnnnnnnnnnntaggttacaatgatataattaaaagtcaaaacagaaaataaaaaacaggaaatgaaaatagaaaaggttggtaaaatttgacactttggttggtaaaatttgtaagaagaaaggtttaaacaatttatgtatacgaaacttgaaagagagatcaaatttgcttgatttaaaaaaaattagagatataattaactcaaaaaaaaacctagaagatgaaaataacttacatttcaaattaaagaaataaaaagttaatgtaaaatgacatttttaataaataatttatgaagagattacgtcttaataataataaaaaaaaaacatatgcaatgatatatattttataaaggtgtagtgtatatgcttaatcaaagctatttactggcttcccaaggattcaggacactctgttttgcttatttatgtgactttgaaactgaacgcaattgttaccattgaaatggagatggagtggtgtagtcattgttgcaggctttgccccaccagattggaaaccatctatggtgacatttccgtcaactcttgcaggttaacaactattactactattctcttttcttctctatttttatgctacaaatataaacaatccaatttggcttgtcataaacaatcgaaatatttaaaatcacatttggaacgtgaaaaatcatatcagaattgtagaacccgaagagtctgcgtgtaagatctcgctgcttttggggaaacagtctattttgtatgagaatctatgttcaattctgattgtgtaaattttcttaggtcaataacagttacgttctgccagcggaattagtctataatttagtgaattgagagacatttgtggtcactaaccaggaaaaagaaaaagaatggtaaagaaccaaatatgttagtataagactaatgtaaacaatcgaaattggcttgttaaaatattaaaaaaaaaaaaagttgagataatgggggaaaataatggggattctttgttagtaaaattgtggactttcatgccattgattgatcccagtgatattcaaatttcaatgtgttttgtttacagcgtctgcgctctatgtggaaaggttctgttagacttgaatgcatcgctccacgtaatgttttcaaataagaaaataaataaaagttctagaagaaagaagagagggagaaatatcaagaatgatgtacaagctcagcaagaagaaagtgtaagtactttgatttgtcctcaattttgttcccttttttttgtctgtggaattttgcacgtatagcagctgaattggtcataagttgctatgtaaattctgcatttgttctgtatttagtctctaatgttttgtgacttttagagtgcattgttgaactgtcttttctctgagtttttttctttaatgtcgctgcttctgtttgggcactgctcagaggaatcttatgattttgaatctagattcaaatatggtattatttgattacaatcagctaaagtgtctaatgttcatgatgaggaaaacggtgaaaaatttaaggtcggaattgcaataagagaaccatgatatcacattcattaaaaattaagatcaattgaagccttgatctttgtttatgttggttgcatagacagactccatcatctatgtctcaaatgaaatgaaaataaaacataatgaacgtagttcaattgacaacacacactgagaagtaaaaagcatgagttagattctcgcatgatacactcttgaagagaagtaannnnnnnnnnnnnnnnnnnnnnnnnnnnnnnnnnnnnnnnnnnnnnnnnnnnnnnnnnnnnnnnnnnnnnnnnnnnnnnnnnnnnnnnnnnnnnnnnnnnnnnnnnnnnnnnnnnnnnnnnnnnnnnnnnnnnnnnnnnnnnnnnnnnnnnnnnnnnnnnnnnnnnnnnnnnnnnnnnnnnnnnnnnnnnnnnnnnnnnnnnnnnnnnnnnnnnnnnnnnnnnnnnnnnnnnnnnnnnnnnnnnnnnnnnnnnnnnnnnnnnnnnnnnnnnnnnnnnnnnnnnnnnnnnnnnnnnnnnnnnnnnnnnnnnnnnnnnnnnnnnnnnnnnnnnnnnnnnnnnnnnnnnnnnnnnnnnnnnnnnnnnnnnnnnnnnnnnnnnnnnnnnnnnnnnnnnnnnnnnnnnnnnnnnnnnnnnnnnnnnnnnnnnnnnnnnnnnnnnnnnnnnnnnnnnnnnnnnnnnnnnnnnnnnnnnnnnnnnnnnnnnnnnnnnnnnnnnnnnnnnnnnnnnnnnnnnnnnnnnnnnnnnnnnnnnnnnnnnnnnnnnnnnnnnnnnnnnnnnnnnnnnnnnnnnnnnnnnnnnnnnnnnnnnnnnnnnnnnnnnnnnnnnnnnnnnnnnnnnnnnnnnnnnnnnnnnnnnnnnnnnnnnnnnnnnnnnnnnnnnnnnnnnnnnnnnnnnnnnnnnnnnnnnnnnnnnnnnnnnnnnnnnnnnnnnnnnnnnnnnnnnnnnnnnnnnnnnnnnnnnnnnnnnnnnnnnnnnnnnnnnnnnnnnnnnnnnnnnnnnnnnnnnnnnnnnnnnnnnnnnnnnnnnnnnnnnnnnnnnnnnnnnnnnnnnnnnnnnnnnnnnnnnnnnnnnnnnnnnnnnnnnnnnnnnnnnnnnnnnnnnnnnnnnnnnnnnnnnnnnnnnnnnnnnnnnnnnnnnnnnnnnnnnnnnnnnnnnnnnnnnnnnnnnnnnnnnnnnnnnnnnnnnnnnnnnnnnnnnnnnnnnnnnnnnnnnnnnnnnnnnnnnnnnnnnnnnnnnnnnnnnnnnnnnnnnnnnnnnnnnnnnnnnnnnnnnnnnnnnnnnnnnnnnnnnnnnnnnnnnnnnnnnnnnnnnnnnnnnnnnnnnnnnnnnnnnnnnnnnnnnnnnnnnnnnnnnnnnnnnnnnnnnnnnnnnnnnnnnnnnnnnnnnnnnnnnnnnnnnnnnnnnnnnnnnnnnnnnnnnnnnnnnnnnnnnnnnnnnnnnnnnnnnnnnnnnnnnnnnnnnnnnnnnnnnnnnnnnnnnnnnnnnnnnnnnnnnnnnnnnnnnnnnnnnnnnnnnnnnnnnnnnnnnnnnnnnnnnnnnnnnnnnnnnnnnnnnnnnnnnnnnnnnnnnnnnnnnnnnnnnnnnnnnnnnnnnnnnnnnnnnnnnnnnnnnnnnnnnnnnnnnnnnnnnnnnnnnnnnnnnnnnnnnnnnnnnnnnnnnnnnnnnnnnnnnnnnnnnnnnnnnnnnnnnnnnnnnnnnnnnnnnnnnnnnnnnnnnnnnnnnnnnnnnnnnnnnnnnnnnnnnnnnnnnnnnnnnnnnnnnnnnnnnnnnnnnnnnnnnnnnnnnnnnnnnnnnnnnnnnnnnnnnnnnnnnnnnnnnnnnnnnnnnnnnnnnnnnnnnnnnnnnnnnnnnnnnnnnnnnnnnnnnnnnnnnnnnnnnnnnnnnnnnnnnnnnnnnnnnnnnnnnnnnnnnnnnnnnnnnnnnnnnnnnnnnnnnnnnnnnnnnnnnnnnnnnnnnnnnnnnnnnnnnnnnnnnnnnnnnnnnnnnnnnnnnnnnnnnnnnnnnnnnnnnnnnnnnnnnnnnnnnnnnnnnnnnnnnnnnnnnnnnnnnnnnnnnnnnnnnnnnnnnnnnnnnnnnnnnnnnnnnnnnnnnnnnnnnnnnnnnnnnnnnnnnnnnnnnnnnnnnnnnnnnnnnnnnnnnnnnnnnnnnnnnnnnnnnnnnnnnnnnnnnnnnnnnnnnnnnnnnnnnnnnnnnnnnnnnnnnnnnnnnnnnnnnnnnnnnnnnnnnnnnnnnnnnnnnnnnnnnnnnnnnnnnnnnnnnnnnnnnnnnnnnnnnnnnnnnnnnnnnnnnnnnnnnnnnnnnnnnnnnnnnnnnnnnnnnnnnnnnnnnnnnnnnnnnnnnnnnnnnnnnnnnnnnnnnnnnnnnnnnnnnnnnnnnnnnnnnnnnnnnnnnnnnnnnnnnnnnnnnnnnnnnnnnnnnnnnnnnnnnnnnnnnnnnnnnnnnnnnnnnnnnnnnnnnnnnnnnnnnnnnnnnnnnnnnnnnnnnnnnnnnnnnnnnnnnnnnnnnnnnnnnnnnnnnnnnnnnnnnnnnnnnnnnnnnnnnnnnnnnnnnnnnnnnnnnnnnnnnnnnnnnnnnnnnnnnnnnnnnnnnnnnnnnnnnnnnnnnnnnnnnnnnnnnnnnnnnnnnnnnnnnnnnnnnnnnnnnnnnntatccaattaatttattttctcaacactatatggaaaaccaaaaaaaaatcttcatacattttaaatcattcaaaattactttgtaatacaacaattatttgatctattttttgctaatcatgttattggtataaagttgttcctcgctgaaagtcataacaaatctccgtcaagaaacatgaacacatagaaggtgagtatttattttctaacatgatttatttgatatccaatggtcaacaaaattcaaacattagatcacttgattaaataacacaagtcgctaccacttgtgttaatcattatttgttaattttaaatgattctttaagaagtaatcaattttaagtgattttttaagaaattttataaattcattatcaataatcttatcaatttttttttaatgaataatatgtttttttttctccacaannnnnnnnnnnnnnnnnnnnnnnnnnnnnnnnnnnnnnnnnnnnnnnnnnnnnnnnnnnnnnnnnnnnnnnnnnnnnnnnnnnnnnnnnnnnnnnnnnnnnnnnnnnnnnnnnnnnnnnnnnnnnnnnnnnnnnnnnnnnnnnnnnnnnnnnnnnnnnnnnnnnnnnnnnnnnnnnnnnnnnnnnnnnnnnnnnnnnnnnnnnnnnnnnnnnnnnnnnnnnnnnnnnnnnnnnnnnnnnnnnnnnnnnnnnnnnnnnnnnnnnnnnnnnnnnnnnnnnnnnnnnnnnnnnnnnnnnnnnnnnnnnnnnnnnnnnnnnnnnnnnnnnnnnnnnnnnnnnnnnnnnnnnnnnnnnnnnnnnnnnnnnnnnnnnnnnnnnnnnnnnnnnnnnnnnnnnnnnnnnnnnnnnnnnnnnnnnnnnnnnnnnnnnnnnnnnnnnnnnnnnnnnnnnnnnnnnnnnnnnnnnnnnnnnnnnnnnnnnnnnnnnnnnnnnnnnnnnnnnnnnnnnnnnnnnnnnnnnnnnnnnnnnnnnnnnnnnnnnnnnnnnnnnnnnnnnnnnnnnnnnnnnnnnnnnnnnnnnnnnnnnnnnnnnnnnnnnnnnnnnnnnnnnnnnnnnnnnnnnnnnnnnnnnnnnnnnnnnnnnnnnnnnnnnnnnnnnnnnnnnnnnnnnnnnnnnnnnnnnnnnnnnnnnnnnnnnnnnnnnnnnnnnnnnnnnnnnnnnnnnnnnnnnnnnnnnnnnnnnnnnnnnnnnnnnnnnnnnnnnnnnnnnnnnnnnnnnnnnnnnnnnnnnnnnnnnnnnnnnnnnnnnnnnnnnnnnnnnnnnnnnnnnnnnnnnnnnnnnnnnnnnnnnnnnnnnnnnnnnnnnnnnnnnnnnnnnnnnnnnnnnnnnnnnnnnnnnnnnnnnnnnnnnnnnnnnnnnnnnnnnnnnnnnnnnnnnnnnnnnnnnnnnnnnnnnnnnnnnnnnnnnnnnnnnnnnnnnnnnnnnnnnnnnnnnnnnnnnnnnnnnnnnnnnnnnnnnnnnnnnnnnnnnnnnnnnnnnnnnnnnnnnnnnnnnnnnnnnnnnnnnnnnnnnnnnnnnnnnnnnnnnnnnnnnnnnnnnnnnnnnnnnnnnnnnnnnnnnnnnnnnnnnnnnnnnnnnnnnnnnnnnnnnnnnnnnnnnnnnnnnnnnnnnnnnnnnnnnnnnnnnnnnnnnnnnnnnnnnnnnnnnnnnnnnnnnnnnnnnnnnnnnnnnnnnnnnnnnnnnnnnnnnnnnnnnnnnnnnnnnnnnnnnnnnnnnnnnnnnnnnnnnnnnnnnnnnnnnnnnnnnnnnnnnnnnnnnnnnnnnnnnnnnnnnnnnnnnnnnnnnnnnnnnnnnnnnnnnnnnnnnnnnnnnnnnnnnnnnnnnnnnnnnnnnnnnnnnnnnnnnnnnnnnnnnnnnnnnnnnnnnnnnnnnnnnnnnnnnnnnnnnnnnnnnnnnnnnnnnnnnnnnnnnnnnnnnnnnnnnnnnnnnnnnnnnnnnnnnnnnnnnnnnnnnnnnnnnnnnnnnnnnnnnnnnnnnnnnnnnnnnnnnnnnnnnnnnnnnnnnnnnnnnnnnnnnnnnnnnnnnnnnnnnnnnnnnnnnnnnnnnnnnnnnnnnnnnnnnnnnnnnnnnnnnnnnnnnnnnnnnnnnnnnnnnnnnnnnnnnnnnnnnnnnnnnnnnnnnnnnnnnnnnnnnnnnnnnnnnnnnnnnnnnnnnnnnnnnnnnnnnnnnnnnnnnnnnnnnnnnnnnnnnnnnnnnnnnnnnnnnnnnnnnnnnnnnnnnnnnnnnnnnnnnnnnnnnnnnnnnnnnnnnnnnnnnnnnnnnnnnnnnnnnnnnnnnnnnnnnnnnnnnnnnnnnnnnnnnnnnnnnnnnnnnnnnnnnnnnnnnnnnnnnnnnnnnnnnnnnnnnnnnnnnnnnnnnnnnnnnnnnnnnnnnnnnnnnnnnnnnnnnnnnnnnnnnnnnnnnnnnnnnnnnnnnnnnnnnnnnnnnnnnnnnnnnnnnnnnnnnnnnnnnnnnnnnnnnnnnnnnnnnnnnnnnnnnnnnnnnnnnnnnnnnnnnnnnnnnnnnnnnnnnnnnnnnnnnnnnnnnnnnnnnnnnnnnnnnnnnnnnnnnnnnnnnnnnnnnnnnnnnnnnnnnnnnnnnnnnnnnnnnnnnnnnnnnnnnnnnnnnnnnnnnnnnnnnnnnnnnnnnnnnnnnnnnnnnnnnnnnnnnnnnnnnnnnnnnnnnnnnnnnnnnnnnnnnnnnnnnnnnnnnnnnnnnnnnnnnnnnnnnnnnnnnnnnnnnnnnnnnnnnnnnnnnnnnnnnnnnnnnnnnnnnnnnnnnnnnnnnnnnnnnnnnnnnnnnnnnnnnnnnnnnnnnnnnnnnnnnnnnnnnnnnnnnnnnnnnnnnnnnnnnnnnnnnnnnnnnnnnnnnnnnnnnnnnnnnnnnnnnnnnnnnnnnnnnnnnnnnnnnnnnnnnnnnnnnnnnnnnnnnnnnnnnnnnnnnnnnnnnnnnnnnnnnnnnnnnnnnnnnnnnnnnnnnnnnnnnnnnnnnnnnnnnnnnnnnnnnnnnnnnnnngctacaaaccatgtttatctcttattttattatgatgcctaagtacatagtacatacataactggtgtcaaattctatttatgaacctatttatttatcatgtctaagtacatgcattattggtgtttataaaaatgttttttagtttaaatttaattatcatgtcaaagtacatgcataattggtgttttaattattttgtattttgattacaagtatctttaataatagataattctatctgagttggatatgagtattataagtgataaaatctatcttttaaatatttaatataatgacatgattaaaactcaaacacaattataaattgaaatattctcacacactaattgaagtatgtgtttgatagtggattagtgggtgttatagttatttaaaatgtgaattcaagtatttattgagtgtttgtgtggttcccgaaaaaggacaaaaaaaggtttgaaaagtagtgaatgaaaacaaagaaaaacagcaaataacgacggtgttgggtctggtaacagcgtagcagcctcagcaatttttggctggcaaacacacgcatgccaccacacgtgcacacacacccctatcatattattcattcacatcccctttttcttccttcttccctttcactctctccctcccacaatggacctccatcgccggccgccggccgccgctgacgacggagcaatccgccaccaccccaagaagaggagtgacacttcctctcccaaggcctccgacgccctccctctccctctgtacctcaccaacgcgatcttcttcacgctgttcttctccgttgcgtacttcctcctccaccgctggcgcgacaagatccgcagccacacccctctccacgtcgtcactctctccgagatcgccgccattttctccctcatcgcctccttcatctacctcctcggcttcttcggcatcgacttcgtccagtccttcatctcacgcgcctccaacgacgcctgggacctcgacgacgccgttacagattctccctctccctcgcccgcaattaccaaattgccctcacgggatgcctcaattatattatcctccgaggatgacgaggagattgtaaactccgtcgtggagggcgtcacgccctcctacgcgctcgagtcccgcctcggcgactgtcgccgcgccgcggcgattcgacgcgcggcgctgcagcgcctgacggggcagtcgcttgagggcctgccgctggaggggttcgactacgactccattttagggcagtgctgcgaaatgccggtagggtatgtgcagattccggtaggggtggcggggccgttgttgttggatggattcgaatacactgtgccgatggccaccacggaagggtgccttgtggcgagtaccaacagagggtgcaaggccatctatgcttctggtggggccagcagtgtggttttgagggattgcatgtcgagggcacctgttgttagattctccactgccaagagagctgcacagttgaagtttttcttggaggatcctctcaattttgataccttgtcacttgttttcaacaggtttgcttttccaaactcttttgtgtctcaaaaatcaattctaactcacaaaatcatgctgataccatgaagaatggaaggaactatttgttgctttaccttcaccatgaatgttttgttttatattttttttatttctcgacatgaagctataatccaaacacactattaatcattcaggagtcagtatcatgttcattaaaatcatgtttgaattcttgttatattagataaaatcatgttgtagtaccggctaactttattttttttaggtaaaatcatgtttttggttgcatgttgaagaattgattgattttgggtccaaactcaattttgagttgaagcggttttataatggattttactactaatttggttttaatataaaaacaatcaaacattaatcacttcactttaaaattaatttttgaccgaaattaattttgcaaaactaattttcttttttcttaattagcttcattcaaacatggactaagttaattttctgcagtttagggattaacattattttttttttaaatgttaggggagaatcaaaggtatggttttcctttaaaattttgatttgtttgttataattgtgaagaggatgagtgaaggaaatatggtgtatagaggactggaatttggatgttgtttatgggagattatttctttatttatttatttatgcgctgagttttgttgcttggtttaatggtgtttcaggtcgagtagatttgccaggcttcaaggtattcagtgtgctatggctggaaagaatgcttttttgagattcacttgtagcacgggtgatgccatggggatgaacatggtttccaaaggggtgcaaaacgttcttgattttcttcagaatgatttccccgacatggatgttattggcatttctggtaatttctttccctttcccattttgatggatgagatttactagatctttctttctttcctttttaaatttattaggactggatctttcttctgttaacctgaatgatgtcaccattcaccaatgccgtttactttgttatatgctactaatactattagacatcggctctttgtctcctttcattgacgtaattgtttctttcatgaaagtggtccaatcatattatcttaattctttccgtattgtttttgatgttttaacctttttttttatcaatgttgtattgtactagtgtaagctttccgtatcatattgacgtgttagcctatttttatttttattattatctgatttgaacaacttgtgtcatttaatgctgttattgtagaagttcgttatacatgtggtattatcaagttgaattattttcggagattgatttgtttgcttaattatgatctatgaagtatgaactatgaacatgatgcaaaaaattttgactatgccaaactcttgcattcatcaccaatttattttaacttgcttgcatctcttatctcttgaatgcgttggtttatttgatatgatgcctataatcaagacatgctgaaattgttttaatgggaatattaggctgaaattgttttaatgggaatattagactgaaaatgtgatggttatgtactgacttgatccttaggaaattattgttcggacaagaaacctgctgcagtaaattggatcgagggacgtgggaaatcagttgtttgtgaagcaattatcaaagaagaagtggtgcagaaggtattgaagaccaacgtgtctgccctggtagagcttaacatgctcaaaaaccttgctggttctgctgtcgccggtgctcttggtggatttaatgcccatgctagtaacattgtttctgccatctttatagccactggccaagatccagctcaaaatgttgagagttcccattgcataaccatgatggaagccgtcaatgacgggagggaccttcacatctcagtgaccatgccttccattgaggtgatttgacacaccccatatattttcttagacaatactcttctataaagttggttaattttccaattcaatagccaaggtttatacgattcatttttgtgctcacaggtgggtactgttgggggtgggactcaacttgcatcccaatctgcttgcttgaatttgcttggtgtgaagggtgcaagcaaggagtcaccaggatcaaactcaagactcttggccaccattgttgctggatctgttttagcaggagagctgtctctgatgtctgctattgcagcagggcagctagtgaacagccacatgaaatacaacagatcaagcaaagatgtaaccaaaatatcatcatcttgaggtcaaggacgtggttgcagttattaattgtggactctagaataaaaaaaatgagagtaagcggaatttgggaaggaaaatggagaatcattagattagattgttggcatccacgtttggctctgcaatgctgtctatttagatcttctattattttgagagaggaaagtagagttatactctacatgttccctgtccccttctggatccttccttctttcctgtatacttttcattgcttgttctgccgagccattgagtgggtgttaacactcttttttctcctcaaccaagacatttgacgtgttatattctgattcgtttcccctatataatatgcttatcatatctatcattgtagccgaatgggttgatgaatgttctcttcttgtccgatagtccccgtcaattaaacttgaccttatctttttcatgatttactaactcttgtcctatatatatgattttctttcaatcactttataataattaaaagaatgtagctaatttaattagtagtagtactaaacttgtcaacgatttttctttcagtattgtctctaaaattattgagatccctttgttttaagtctttatctaactaatgaatgtatttctgtttaagggtaattttgcaagaatgttaattaacgcaatagataaattggggaaggtcttataaaaaggatttagataattttacaagagatttttgcaaaaagcactcgaggtagtatttagtttatttgcaccatagagaccagagatttttgccattttcattttctgttcaaactaagatatatgtttagcattggtgttttgaggcatttcattggcaaaatgcttctttggtattcaagcataaggatcatcactcaatcatttgatattcgcttatctatgttataggatgaacttctaaattgatattttaaaatagttagtagataattatgttttttttgtcatgctattcggttcctaactgtatatatgaaaaagagttttgttccaagtgtagaatttacttcaatgatttttacacttcaaatgattgtatatgttttcaattcatgtaaataggatactgtttacttttagtcacttgaaattaaattaacttgttttgatctatcgtttataaaagatgctacagtaatctttattttcataaattaattaacttattttgatctatcgtttataaaaaaaatgctatagtaatctttattttcataaattaaggagaaaaaataacatgacgataaaattgacttcacgcgacactaacatattagattgactcattgcttcaagtccaatatgttaagtattgttaaactataaagttaacctcataaacatggtgatggaagaaacgggacctggcagagtgctcccccttggggggccatcccctcaatgggagaattttcttcccattttagatggattcctccatagtgagactgtttttttcttcttcttccaccttcccttttctacctcacaaccacaaccttacttctttttaccattgccttcacccactttccttcctccatttttagctaccatcttcatccctttttctatttttttttataccggataaagtacccgactaagctgagggaacacctggcccatccaaatcgaacacatcccttggctatgtgtatttatatatgtcgaacagtacgtctcgaccttcaacatgtgcaagcaatgagtaccactcgactgtgattatcacccctaaacccatttaagggtgatcacttaattgaaagtgtctaagcatgatcagaaggaatattacttaattgataatcatgatgtgacaaacacacagatctcagacccaacaagattaatataaaaaggcgtgaacccctcaggtaaaaggactgattcattctcacctactcactacatatccttaatagctctgaatcaaaccttcacttgagcgtcaaagtgttttttgcatgtactctttcttttgttttccagacacgtaagcacttgagacacttcggtaggaaaaaccaaacagacaacccttcaacataatagaagaccgttcgataaaaagatagatatatgatgcatttgtgacattgaacattttttttttgtgatttttcctatgcctctctcttctttgtgagtctttttttgccattgaagccaaatcaccaaaggtttttactacttaggcaacactaccttagttagctttgttgcttttctacgaggtccttacataacattgttctacttagatttgctgtgtgttgctttagttcattactggttgacaagtggcaatctggaagggactacaaagaaaaatatgtagaaatgtctaagactctagcaatgtttttatatgtgtagctaatggccgagcgtgcgtgcctgttttattgttgtttatttattgtgcattgttgtaacacaatgctcctttcacagtatcttgagtttgtaggtgtcttttgacattttcaattaatgataactgaacagaaaaaatatattatttgtgtgaagtatttctattaatttttctatttacaaggcattttttcttataatttgtgtcatgtcagacatataaaagagggaaatattttattgaaatatgtaaaatgttttcctacagtttttaaatgcgtttttatatgatttccaataaaaactttcattttttaatttctttaactagtgtcctaaaggtaagaacattcgacagcaagacacattaattaatactatctagtattttttaaattattatattaactaattttgaatgttaaaattctttattgagtttgtgtataaattatttatcctatgtttgaaaaatggttgtaagagatgttatgttttaagtgatgggtatgtaactaagtggaatacttaaaaggaagttttgttgtttagagtaattttatcggactcttgtttccggtaaagaatacatgtcatatatatatatatatataactattgtccagtctctatacatacgttgagttttaaagatgatgaagagacttgctttgaacgtatttcagtcctttgcaaatgggcccaaatatatcattattttttttttttatcacaacacaatattactcttttaattaaacatattatcagagataataaacttttttatataattattaagaaaaatcaacaaacttaaactaattgtatataacaatttctgattaaatagcaatgtatatctttacacgatttagcacgtaaaaatcctttatacaccaaatggtcatggttgtaatatttttggtgggatagagaatgggctgaaggcccaaatgtagataaaaattaaatatcggttcgaaatagagaccagctctaaagaaatctcacgttcactgcgagagcaggagccagaaaactgctgcttctcgaagttcaaaacttaaaccctagttctactctctctctctctctctctctctctctctctctctttcttctgcgtcttcaaccatgtcagcgatgctggtaagttcattctctttctgctctgttacgtgtttccataacctaacctaacctaactcgttgctattggaaatggtgtgggatcaaacagcaacctcagatcattctgctgaaggaaggcacggacacttcgcaagggaagccacagctggtgagcaacatcaatgcctgcaccgccgtcgccgacgtcgtccgcaccaccctcggccctcgcggcatggacaagctcatccacgacgacaagggaaccgtcaccatctccaacgacggcgccaccatcatgaagctcctcgacatcgtccaccctgccgcaaaaatcctcgtcgacatcgccaagtctcaggactccgaggtaactttaacttcccttcgatctcatgcaatgccacttctttcaagatcttttcattttcgcttcattcagattctttaaactttggaattggaattggaattttttgttagtaaatgaactcttgtattgttgtgaatttgaaaaaggttggcgatggaaccaccactgtggtgttgcttgcagctgagtttttaagggaggccaagccattcattgaagatggtgttcactctcaaaacttgatacggagctataggacggcctgctccttggtacagagctatctccaattttatttatttacgccttgtttgaataaacttctatataaccgtttataggagaataagttaacaagctgaaatgaattgagtttctctcttaagttaaaattaacttatgcactttaacttttgcaaaagttctcttatctaacttctccggatgttgatgtgcagaagtttattttagcttatgggagaagttcgattcattttaccttttttattttctcttataagtgcttatggaaaagtttacctaagcagggcctggccttaatttttcttttatttttgtcttaaattactgttgaataatgtaagtggaaggatgttcctgatttgtcacattacttttgtcttgttttatcattggtgcaggctattgagaagattaaagatttagctgttagcatagaggggaaaagtctggaagaaaagaaaagcttgcttgcaaagtgtgcttctaccactctttcttcgaagcttataggtggagagaaagaattctttgcacccatggttgtggatgctgtaatttcaattgaaaatgaagacaggttgaacatgattggaataaagaaggtacatgtgttggttcttttgcaatcttgtatttgtgtgctgcattctctcttttacattggtgattgtttgattgtcctccacattaacaatagtgctcattaaatattttcttcataattgtaaaattaagttgatttttttaatagatgaattattaataatacattgtcatgagaaatgggtaatttagttcaataatcactttctctctctctagattttaggatagttattagtttccttaattcttgtgctatatactctaaagtgacaattatttgagaatgagtaaaaagcatcatcatcatcatcatttatatttagtgcctccctccccccaaataaagcctgccgagtttttatagtattgtaattagattttttgggcttccacttcccttcagatatggtaaagtagatgtgttatatttgttttccatgttctataataatgttttttggaattttaaatgtgtgcatttgtatttgattgcccaaatgatgtaatagaaagtacaaacaatcaactaaccaaaatggttacgaatgaagatcaaggagtgttactgtcatgcaggattttgtttttatggttaaatgtttaattacatgttaatcaattttgtgttagtgtttagaatttttttgaaaatcaatcgtggagactcaggttttcttctacaggttcctggtggtaccatgcgggactcatttctagtgaatggtgttgccttcaaaaagacattttcatatgctgggtttgagcaacagcccaagaagtttctcaatccaaaaatactattactaaatgttgagttggagctaaaatctgagaaagaaaatgcagaaataaggtatttttgttttaattttttttttgtttgacgatgctgacctgggatcttagtgaaggattgcataccaaattggaattcattctttttttcttgttctctacaggttatcagatcctgcgcaatatcagtcaatagttgatgcagaatggaatattatttatgacaagttggataaatgtgtcagcagtggtgccaaagttgttctttcacgattggctattggtgatctagctacacaggttttaatcattttttttaattaaatctatttttttttcatattcttggatttctttcaactacctataaaatatccaacgtttcttttaagtaaatgcaaagtgtgctgtgtgccacctcctccaaggatggtttcctggtacattttatgcattgtctcttatgtaataatgagcttttattcattttttcattttctattctgcatcaacctgtttgtgttttacacgtttaagtgtggattgacacccttattaattgttcatgataatggttgaaaattactccttttactatgttaaaaactttcagggatatcaactataattagtttttttttttttaaaataattttcccttgaaacagtattttgcagatcgagatattttctgtgctggtcgtgtagctgaagaagatctaaaaagggttgctgctgcttctggtggaaccgtacaaacatctgtgaataacattattgatgaggtttcacattacttgtgtaactctgtcgtgatttgctcattttctgtaattttatgcattacagatgaacttcttgtgatttatttgcttgaaggtccttggaacttgtgaaatttttgaggaaaggcaggttggaaatgagaggttcaatattttcaatggatgtccatctggccaaacagccaccatagttcttcgtggtggagctgatcaggtctgttatgtgctgtgcaataactgtttatgaaacttgtagttgaactcatgtaatagctctggtaatcttggacttatatttgatatctactattttcttacagttcatagaggaagcagagcgaagtttgcatgatgcaatcatgattgttaggagggctttgaagaattcaacagtggttgctgggggaggtgcaatagatgtatgtgtctaaaatttgtaggtagttatcactgatttatattagtcaacttgttggaagttaatatgtggttcttgttggtagatggagataagccggtatctgaggcagcatgcacgtacaatagctggaaagtctcagcttttcattaactcctatgcaaaagctcttgaggtaactgttttggaatttggcacaatcctttttatgttattctagtattttattcattcaactttgttagtaactcgaggcaatgcctgtttgacacacaagtggttttgttttggcactaacgacgatctccatcaagaacttctcagcttaatggtcttaagtttaaactaataggattcctagctattagcaatgtgtttctttaatgttgttttttccaaattcaacgttaatgccattaataatgtgtctggtagtcgatccatatttaacaatgcatagcaattctggaaaatcttaagggcggctctcacttctcagacattttatccaatgatgaggaactgttcaatcatatgcctccttactgtattactattggggaagggttgggagaaaaatcctttgtgcatgtgttttacatggcgcaattcaacctgaaattgacacattgatatgttcctttattttaacattgtaaaagtagaagtgctcattgcatttgactatttgagacattaattgctgtgctggatgttggaggtctgtgagcatgggattatcaaatgacgtcttttagcaggctataactttttcacattagatgttttgaaattgcatcccttagtatttggttttgcatgaagacttagggtactgtaagaaattagacctgaagggtatggaatcatgttcttccactcagagtatacttgattgttttttttatgcaaagttatggtattactgcaggttatacctagacaattatgtgacaatgccggatttgatgcaactgatgtgctgaataaactaaggcagaaacatgcgcttccttctggttggttggccatctttttgtatgcatgcagtgtgcttgtttacatagatgtattttatgattactggcatgcatgctggcatatactcatttgtctgcttgttacaggtgagggggcaccctatggggtggacatagcaactggtggaattgctgactcatttgctaactttgtctgggagcctgcacttgtgaaggtatctgcctgcatttatttgcataatgtcctgattctgatgttttatgtgcatggtgtttaagttagttaacatttttgcagatcaatgctataaatgctgcaacagaggctgcttgccttatcttaagtgtggatgaaacaattaaaaatcccaaggtaagtttagttctgttattgtatattagatgaggattgtgcttctgttcataacttatttcctggagatttgcacaatttgaaggaattattgatttttattatcatattatattatgtattttctaatttcacgttagttatttctctgtttggtcttcatcttttggtcagggattttgtattttgaaagggtaatgctttataaatttaccttttgatatgtgcagcagcagcacataaagaattctctgcacaaatcctcttgcaactcaattgttttacacttgtctcttttaagcattgtacatatatcactatgcgttgaggaatgagtactagtttcatgcaaatttgttgtacttgttttgaaaatggtatccgggtctctatcgattagcatattccgtgggaatggtatcctccttctactccatgtgaatggggtttccatggtttgctaagggaagagacagtaagggcttcattcctcatctgaattctttaaagacaggaatcaatattctctttattggagatgtgggaatgccgttattggtgggacctatgggatagagattttttgtttcttttcctaacttaaatgcttatgctcttacaaaatgacaaaaaaagttctctcacacgaggtacccaaattttttagtagttttacaaaaaatttgtgcccttgccttgtttcctgtcaataattattatttttaaagtttgacccaccttagttggattgagtgccattgagttttaatgcaactacattccctatacttgaacttgagataattggttaagttagaagttgtaacttattcaagggacaaacagagagagagggagattgtggacaattttggtattgttgcaattgttctacccggatctatcttgtgactatctgaatgttacattgattttcagaaatatgttatgtctactaactagatcctcttttattcttaatgtaactagatcctcttttattctggctacttccgttatgcagctgattttgattttgtctatttaacatctgtagtctgaaagtgcacaaggagatgctgctgcaagtgccatgggcagaggtcgtggaggtggattccgtggtcgtggacgaggaatgcgaagatgatttgaagtgcattctacgggttgagtgtctgttttaattcgtgaggccaatgcatgcttgtttcttctactaggtgttgctggaagcatgccgatttttggacctacaaatcatgaaatgaaaatgtaatggagattctgggaaacatcatctgatcaacctaggatttgcagatagcaattttcaagcattgtctttctgacgatcgttttatacattgggagggttaaaactatcccatggctgtggaggacttgagttcgtgtgaaatttggaatcttcttctacaattttcacctatttatttattacttggtatgcgtatagtataaacatgtgatttcagggtttttttttccgtctacaagtcattagtggggatgtgtacggatatgggctactaaaattgatattcgagtagttgtttaccgtagtgggtaattgctatcactcaaaagtaagtgcaaattattgtatttaccaagctacgttaaaaaaattgaataaattattgagcacacaaaaatggatttatggttcatgccgtgataaaaatagtaataacataatattataagagaaaaaggttatgcacggtaaaaaaaaaatagtcatttaatcataggttttatcaataagtttcttaatttttaaaataattatttatgattgaatgataatttaaatttattttacaatatcaatataattttacttataaatatactttaaaaaataaattaacaataaatagtaaaacttttatttcactggaaaattatttatgttttgtaagataaaagattgaggctgaggattaatactttatgtatggacaatccaaggagttcagccttgaaagtttgtaacagccaattctagcttcataacctcgtgctagacaccatatcttcctagatgccattcatgttctaattcattaatcatgggagtaaagcactagatttagattagtccttgaaattaagttaatttaattctgaattttataaaaaagaaattttagttaatgacttttataactgtcaatcaatttaattcttaaaattgacgctatcaattaatttcgtctgacattataaaatcaattgtttttttttataagctagaatcaattgtttaatccttgaatttgacaatcataattcataagttcatttaactattaggaaccgaattgactaatgcccataaaaatcaggtattacaatgactataattgggaaatttagaaattnnnnnnnnnnnnnnnnnnnnnnnnnnnnnnnnnnnnnnnnnnnnnnnnnnnnnnnnnnnnnnnnnnnnnnnnnnnnnnnnnnnnnnnnnnnnnnnnnnnnnnnnnnnnnnnnnnnnnnnnnnnnnnnnnnnnnnnnnnnnnnnnnnnnnnnnnnnnnnnnnnnnnnnnnnnnnnnnnnnnnnnnnnnnnnnnnnnnnnnnnnnnnnnnnnnnnnnnnnnnnnnnnnnnnnnnnnnnnnnnnnnnnnnnnnnnnnnnnnnnnaactagctattacagttgaaagttcaagatcttataaactccaccctagaatctcatatttataatgtaaatgattcagtaacaaaaaattaaaaatgctattgtatatgatctattagacttaacagaagaaaattgtcgagtacacaatttagatatagattaagcttatagagataaaggtttagactctagagagtaattccagttgtacacactgaagactggtaataaatcaattcttagatggaattattatgattttgctatttgtatcatttaaccctgggtgtgaagaaattgaccatcgcggattttcttcttgagttatatgttgtaagaaaacaagaactaaattattacttatcctaattgtgttgtcaaactatatataaaaaaacaactaataaaaattaaagaaaaaatatttcatgattacaatgaattatcgccccactacatgcgagaaccaaaatgttagcaatctttaagtatgaattgcaaacaacgaagctattagcagacagaagatataaatgcacataaacttatgtcatagattcagtcgaaaaagtaaaggtttttgttgggtcaaaggtttgggctaagaaaaagaatcaaggtctacggaagaggatttatcaaggcacgactttatacttcatgctgcaaatgaaaaaaaaatactaataagcatcagacaccctaaatgaggaattttttgtatgaatcttccttcacatttatgacagctggcaagtattttttttatttttatttttttgaaaatgagaaaactaataaataaggataaaaactaccaaaggagtatgtactacatgagcatcgaaaatttgttcctaaatgtggaggaagatcattggttttgactcttgaagcctcaccattgcatagtgtatgagctacaaaattgaactttaattttctaaaatgattaatgaaacattggagacggtaaaaggaaatagctaacagaaattaaacagcaacaagatgaagattttgaagaagcaagaatcctcagaactacaatcttaatgattacaaatattctgcagaaaactgattcagtaatttggcaatttacttcatagtcaaaagcattgcaagacaaatccatatctaataaaaagatatcacgaaaattccattatgctacaatttaaatctcagaatcctgtgagcagagtggtgacttcatcagttgctttggcttctacaggaatgggggcaatattacccatcgacgaggatacctaggtctaccttcctttccatcaaataactgcaggttcatcgaaaaagataagacacatgattcatgattataagatgcaaaaaggggaagagactagtagtatgttgggaacacgttttacaaccaacaaatcatgtccttaatatgaaaaacataaagatagtagcattcattttgatgttaaaaaccacgtgcttgatccgtctccaaacatgctgtaacaatattggttcactttatagtatatgatatggtttcaccccatacaaatgataattttataaataaataaaaaatgcaaaatccatatgtagttgaccttggcataaccaagcaataaacattatattcttacaagaagcagcatttttgaatccacatgtttaactttaacatagaagcagaagaaacaacatgatggagtctgaaaatcaagttagccacaaacctttgaaatcctcaaaatctaaaaccagacagtataggaaaaagcacaatcaagttattcctttacaagaaagttcaggtggagtatataatttgctcttagatatttttctaagactgtaaaccggattagtgagctgaaatataaaaggtaaggaggcataccttctctaaacgcctgtgcttggctaaagcccaattggtcatgataaaagtagcaaccacaaggaaaatatagcctgcaacagtttgcgttgcaatgttgaatcccaaccactgatagatctcggttgtataatttgcacaggtaacaatattgaagagaaagccccttgggatttggtatccaccttcaccaccaggactacgaagattcttcagaataatatggcaatagaaatttgaaatttgacaaagtatcccaattccaaacccaatcttcatttgaaggtcgtttacaggggtatataaagggtggttcacataataagcaatataggagccaaaggtccagtaataagcacagttacgaaacacattggaaaggggtgaggttgcatggctgaagcgatgcacaaaaaatgtttccagaattcgtttggcataatggaaacaccagtagtacaaggcatatgtctgcacaggatggaggacacgttcacctttgtagccaaaatattggtagacagggagataatagaagactggatagagaagcaaaggtcccaaatactcgcagaagaaaagtgtacggtaagaaacttgtgggcccaaatccttgaatacaacagttaaggtttctgaatttccacttgtatagtctttcagactctttttgtaattaaggacaacaggcctttcctttgatccggattggacaggaagtgtcaagcgctgccttgatgggtgcttcttggctgtaagtgaaacatacaaatcatgttaatgatctatgaaatccaatggtgcctagagacacagatacacttacagataagcatttttttttcttccaagagaggtactaagatggaaagacaaagccatacaataatagcgggagttgcatgcaggattgaactagtgctgtcatcaatatttcattttatttcaccacccaattaaaattgggttatgttttcataagctgaggaacattcaaatatttctattcaacttcaacaacctagaataggtttaactataaagctactgacaaagacttggatctataatctaataaacaatactgagactcaatgctactaggttatcatcctgctataatcattaaaggatcttaatttatgaagcccagatactctaaaaaagcaaatgtatcggcgtccaacatgtacccaataccaaaatggctaaagatactgctgagaacctcagaatacagtttcatttcaaaaagacatgtagtgtatttttttgttaaatttcccttttcatgtaggttgttccaaatcgtgttgcaaaaaggagcccccatcaccactagggcttgcaaacagcaagtccaaaaccaaatgcatcttccttctcatgaacaatctcctgcaagtatctgcattgctgaagttgctggtggttctagctcctcttttggttctctctccttcgctgggtgccggtccgtgttctccaagttgttattgctattgtgcatttttggtaatgtatcatggttttgtcctttttttttttaataaaaattttatatctgtatctgtatcataagcatatcatattatgtatctgggattcttggattttaataaatactacatagtaagaatgataaacgtcaatgaacatcaggagctgttgttatcaattatcatatcactcagtgtaataagttaaaatccatcacaagtaaaaaacaactaaaaccacatgtacaactaccttagtatccttaggctttgtttgggagttaggaggggaagggaaggaaagagattcaaggggaaaggaggagaaggaaagggaggaaaatgagggaagttccttcctccttgtttggaagttaaaaatatattaagagaggaaaatggagagttaataagatattaaatatgaaaatgatataatttaaatgtaaaaatatattaaaaatatattttaatatatttttgaatgtgtagctggagtaggatagtaattttaattacttttccttctaaaaatccccaaattgggggaactacaatttgtagactttggaggatttcagaggagttttaaaaatcctcaaatcctttctctcaaaaattaaaactcccaaacaaggagatgtctctacctaaacctttcccttccctctctttccatctaaaatctctctcccaaacaaagccatatatgcccaagactaactggatttcagttattttacatctcagacattactttaaaaacaaagtaatttatacataagcatagtagagaaaatgaataagttcacttacttcgcttatgaattgcctcctgcagatctgctacagtagcctaaaaagaaataaagggataaaccataaattattactcttgaaaacaaagtccccttttgccaattgaaaagatagacaaaatgaagggaacttttccgccatatagataaaacctaactctccaaatcaatcgagatatcaaaatccaaaactaccatgaaaacaataaaattaacacaaaaaagagagtaaaaaattcagagggaaaaaaaagacatacagaatcgctgagctcaatgccacctttaaccacttctcttccactccgagaaaccactgtgaccttcatctttgcgaatcaataaagggttactgtatgcaagatccaacagaactaggggtctgaaaatagaaaaaacgaagattcagatcagcagccaaaaacacaatgcaaggagtgtgattttttacacgaagctattaaattaacaatcatgttaatgtagcagaaaaccccacattaaatttctaataattattgcaaaacaatcgtcaagtttccaagcttttttatttatttagtaatagtgtggaataagaagttagcaaaagatacgaactttgacgaagaaagtcgggattcgatgataacagagaatgtgagtcacagcaaaattaggcaaaaaaataagaaaattaacaaaagctcgttgctgagaaatgaatgacccaattggaggaaaagaagtaaggaagaagaaaggggaataatcacctgaattggacagagagaggtggtgttggtgtgtttgcaagttactcgcaaacacaaatgaaatgtgagcttaggaaaattgaaactcagatgtaatatattatatatagattttagatgggagaagataaattaatgtgaagtatggtcaggagaagatgaagccatgcatatgcatacattaatgtgatgcagttggggttggacagctaaccgttttggctgataatctataactcaccacaaattgtaacaaagttccaattggttttgtgttgttgaaattgatggtgaaaaaaattattttgaaaaaatatatttgtatttgtgaacaaatgatttttctttaaaaaaaatgtaattttcttatggaataaaaatgtaaatataataatattttttttattaatttatgctcagaataaattattattagtgaaacattaaaaattcacacttctcctaaaaatgaaaaagataaattaatgtttcctcttacctttaaaccttattaatttatggtcagaataaattcttatttcttttatagcattttgctcaaatggttaaagagaaacagtgcatcgagttctttgcaatggttaccttgatcctctttttctagtatctcaaagcctagtgtatttggtttggggagtgtaaaatcataatgagtgaaaaatcatacttcactacaaaagtaattatttgttgcttctaaaatttatattaagttcaattcaccaccaatttaaacacatactaagagaattattgagtataactataaaacatgtaaaatccatactagatcttacaaattgtacatcctacctcttccttgttgatagttctcccctttctcgttagaatattttgataatacattttggtctctttttcattgtttcagagtttttgtaaaaataaatatttcactactttctttcaccatgtatgatgagtaaagtttaaccgataaannnnnnnnnnnnnnnnnnnnnnnnnnnnnnnnnnnnnnnnnnnnnnnnnnnnnnnnnnnnnnnnnnnnnnnnnnnnnnnnnnnnnnnnnnnnnnnnnnnnnnnnnnnnnnnnnnnnnnnnnnnnnnnnnnnnnnnnnnnnnnnnnnnnnnnnnnnnnnnnnnncgatttcgtacaaaatagtgatattgctttttaaaaattagttctacttaatacaaaactaattttgacaaacacacacctcaatatttttagcgcaagcttgcatttgcttgtaacaaaacaacctacaattcatccagatttgatctttccatcttattatttttgttgcgttagaaaaaaaaacataaaataaatatattatatttattatggcccatggcagcgcgtctcaaaacagtagttggatgatgaaatggttgtgcatttactaactattacctactttattatagtccacaggcttctgcctaattaaattattgtttttgaatgcattttgtttacctacaattgcctaattaaccattgatttcgtgacttgttgttttcttttggtcagcggaggaagggaattgagaaacgataaaagggtccagtgaaaataattagtattcactccataagctgtgtttatttcaagaaaaaacaataagaactaagaaggatcaaatttatgtttcttccatcgtttagattgcttgtaaaatggagagaaagagttaaggaacttaatataattagttaaacaaggtgtgagttgttataaactctttacactatttttaatttttacggataaaacaaatggtctgcccaagattaaacaaagaaagagagatgagaagaaaattaaagtcaaagagatatagaaaatattgtttacattacataaatatcattgttggaaattgaatcaatctgttagttttactaagcaatgctatatacaaatgaaaataactcccgtcacaatttactattgagttgaaactgaaactgatgctaaaaaatggaaaatgagttgttagggttgatttgaggtgtggtttgcttttccatcttttgaaacaaacttggcaatcctatcaattgttggccgaactcaaatttcttaacttcatattcnnnnnnnnnnnnnnnnnnnnnnnnnnnnnnnnnnnnnnnnnnnnnnnnnnnnnnnnnnnnnnnnnnnnnnnnnnnnnnnnnnnnnnnnnnnnnnnnnnnnnnnnnnnnnnnnnnnnnnnnnnnnnnnnnnnnnnnnnnnnnnnnnnnnnnnnnnnnnnnnnnnnnnnnnnnnnnnnnnnnnnnnnnnnnnnnnnnnnnnnnnnnnnnnnnnnnnnnnnnnnnnnnnnnnnnnnnnnnnnnnnnnnnnnnnnnnnnnnnnnnnnnnnnnnnnnnnnnnnnnnnnnnnnnnnnnnnnnnnnnnnnnnnnnnnnnnnnnnnnnnnnnnnnnnnnnnnnnnnnnnnnnnnnnnnnnnnnnnnnnnnnnnnnnnnnnnnnnnnnnnnnnnnnnnnnnnnnnnnnnnnnnnnnnnnnnnnnnnnnnnnnnnnnnnnnnnnnnnnnnnnnnnnnnnnnnnnnnnnnnnnnnnnnnnnnnnnnnnnnnnnnnnnnnnnnnnnnnnnnnnnnnnnnnnnnnnnnnnnnnnnnnnnnnnnnnnnnnnnnnnnnnnnnnnnnnnnnnnnnnnnnnnnntaattcttcaaatatttctcataaaaactttactagtattttcataaccatttccttttcccgtgtatccaagtttgtttgacatttgttgtcttaaaataaataaataaatgaattgaatgccaatgatttttttattgaatcaaattagatttaatattatactcaaatcaaactgcatcacaatttacttttatgattagattgaatgatcttttgttctgaaaccaatccaaatcaatttatgataacccctggcctacttattatcttgttccaaatcacccaataccttttattaaacacaaatttgtttgagcaacatcaagtataagaagcctttaaataattagtgcaaattctggaaatgatcttcatatagacactgtcaaagactcagtcgtatgttaaagattggtgagcagtttatgacaagtatgcttacacaagcaactttattatatcattcaaattctaaattctaaatgtaacaaatcacagagccttgggtgataaaatggttgtaacaagctcatccattgctctcacagatgaccctttttctttacctttctctgttttggcctctctaatgtaagctgcaatctcatttgccttctccttcatctcctttcccttcccttcataatccataactatttctattgtcttcttaaccttctccctagaaaccacagtttccgtagaacgagtaagttccacagccacacccatttcctccaccaacatcttcatattataaggttgatctgcaacaattggccacccaatcagaggcaccccaccccatagctgagactctccaacacagagttccatccacaatggctcagaaaagctcctgtggaagtgtgtgacagaatctccaactggggtccccatttgtgcaccaaaaggccacgtttggtctctctcattctctcttcaaacccttttggcaaccattctgcactgaactctccattgatgtcaaaaccagcaggtggccttataacccaaataaacgatttcccactctcttccaaaccctcagccaaagccatcatttgagatgcactgatagtgttcagtgacccaaatgaaatatagagaacagaattctcatcctttgaatccagccactcaatgcatgcatcaagagctatgccagtttcctttcctgaacgatgttttgaacccatgagtgaagcaggtggaaggagaggccccacggcccaaacgggaagttgaagatagttcctcagaagctttaaccccaaaggctctatcttttccatcgtattgcaaatccacccatcagacttcatagaaagttgaatctgtggaacgaggaatcctgaccaatcatcagtgccatcagctgcttgaagaaacatatgcaattgagttctgtggaaacggtagttttgagggaaacccggaacatggaactcatcagaatcagttttcctgtgagggaggttggaccagatagagatataggccaagattccataagcaccacaagtggtgaaggttaggttcctagtgcctaagctctttgcaacattgttaacccaaccaaggaacatgtcagatattatgcaaagtggagggtgaccctcttcttgtgtgatctgagatatcaaggagcgaaaaggaggctcaagggtgagtgatgcatagccaagtttcaataggtcagtgagaggagccttttgtgtgttgttgtctatgttggagtgttgggtagagttgaagggtactaactcagcaagatggatttgatgattaggagaagtagaagaagaaagtgcagatcgaaggtgttgaatgttttggggtgtgttggctatggtgatggtgaagcttgtgttttgttggatttgtcttgctagtgcgagaaatgggatgaggtggccttgtgctatgagaggtaccatcacgatgtggcctttgtttggtgtctctgccatgggagcgagctcgatcgaggaatgatgtgctacatcctgcgctgtctgtggtataagaacactaaactcaactcttgttgtcttggtttctgctaagaagtgtacaaaagaaatagcaaagagcctgagatgatgaagtaacgtgaaactcttgttgtcttggtttctgataagaagggtgcaacataaagcaaaaagagccaaaaaaaactatctgaatcaatgcactcaactacctatgcatgttgaactagaccagcttttcgatgctgcgggacctgacctgactacccaagaagggaaagaaaagttataaacattagaaaaactagaggaataaaaaaatgcatgttggccatttaagatggattgggtggaaaacaaaattaaaaatagtataatttacttattaactaatctccaacacagttgaatcaaaataattaatttgtaaaccaaaaggaaatcaaatattgctattaaaaacttgagggtctaaaatcctaaatttaaaaatataggagattaaaaatgtgatttagcctaaaagataatgactcagacaaagatatttatgcacactcatttttttttttgaaagaatttttttttgtcctacagttcatctcaatttattattttctcttctttttcattttttcatctcaatttttatgtgcacttttattatgtgttgcccttcgtgaataggaaatattttttgaacacaaaaagtgtgtaattcaatgttactgcttttgtaaaatatatactgtaattcttttatattattattcaattatatattaaaaaatgtgcgtcaaatttccttttaagggggaaatctttgaacgttttagaataatccatcatgttggccttagtatcaaagagcttgaatgcttgaaagtgcttcttccagccatgaaaagtttactttttaaacaaaggaacaacttagacggacaattaagacatgatttcaatgattactttattattactataattagagtagagtgtcgatgtatccataaaattcatattcctatttcataatccaataatttcatttttgtttgatttctttttttataaaaaaaatgaatatatcaacgcatagtaaaaacagagctactattttggatcactctcgatgggtttagacttacattaaatggaaagacaatgtgttgacctaatacctaatacacgtcacagatcaaaaaccttatgagcctacatcaagttgtcatatagcacatgagtgtttatatataattttttttttaaaacaatttatcatttctcatcacgtaataataactacctcaacttttataaatttaatagcacttattacaaatccaagatgcttgtgaaggagtatttatcttataataagttttaagtaataatatataaacatctcatcattttaaatatttcttcaatatctctttttttttttattttttttcttcttatcatatttannnnnnnnnnnnnnnnnnnnnnnnnnnnnnnnnnnnnnnnnnnnnnnnnnnnnnnnnnnnnnnnnnnnnnnnnnnnnnnnnnnnnnnnnnnnnnnnnnnnnnnnnnnnnnnnnnnnnnnnnnnnnnnnnnnnnnnnnnnnnnnnnnnnnnnnnnnnnnnnnnnnnnnnnnnnnnnnnnnnnnnnnnnnnnnnnnnnnnnnnnnnnnnnnnnnnnnnncatatttatatcatttttccctctccttaaatgttaaataatacaataggtgtctatgcaactttcataagtttttttaaagtttgacccccctagttatacctcttttggttccattccttggataaatggttccctatctcttgtatctctttatcaatcaataatactaatctgttttcattctttctgtacactctcttcgagaatagtaaaaaagtaaatctcatcccatccttggatgtaacattatagattaatagatatagatagattagatagacactataatcatattggatattgcaaacaagaagtgcagattttgcatttgatatagagatcgagaagggaaagtaaaacaattctgaacagggaacaagaaaacaggaacacactggttataaaaattcagcacttttgatgatataagcgaagtagtaggatgataaaagaatgaggaatgatatatctaagttatcgactatcatttattttaaatgtttcattattatttaacatttttttttatctttctcatctcgtcacatcataaattttattaaatttatactttccttttctgtctctcactgggcatctaacttaaaatattttcctataacaattcagcaattatgtcaatgttaatatttgataacaaaaaatttaaaacactcaataaacaattcttttttctctttatctctctttatattacactacatcattaattaaataaatcacctatctttcatctctttccttctctctcagtaaacaatttaagctacactaacttcatcctcataattaatgattattatatattaaaagtttatatagatacgtgtgcttgctgagatcatattcattcaccttttatgctgaactcaaatcatcaattaaaatgagttaaatgattatcttcatagtgacaatattaccaaagtcttgtgctaaagcttgctgagcagtgcctaacaagtatgcttacacaagcaactttattatcattcaaattctaaatgcaacaaatcacaatgccttgggtgataaaatggttcttacaagatcatccattgctctcacagaagaccctttttctttacctttctctgttttggcctctttcatgtgagctgcaatctcagtcgcgttctccttcatctcctttcccttcccttcttgctccataactatctctataaccttcttaacctgttccccagaaatgacagtttccacagttcgagtaagctcaacagccacacccatttcctccaccaacatctttacattgtatgcttgttctgcagctagtggccatccaattataggaaccccacagctgagactctccaacacagagttccatccacaatggcttagaaatgctcctgtggaactgtgtgacagaatctccaactggggtccccatttgtgcaccaaaaggccacgtttggtgtctctcattctctcttcaaacccttttggcaaccattctgcaatgaactctccattgatgtcaaaaccaaaaggtggccttgtgacccaaataaacgatctaccactctcttccaaaccttcagccaaagccatcatttgagatgcactgatagtgttctgtgacccaaatgaaatgtagagaacagaactctcatccttcgaatccagccactgcatgcatgcatcaagggctatgccagattcttttcctgcacgatgttttgaatccatgagtgaagcaggtggaaggagaggccccacagtccaaacgggaagttgaagatagttcccgagaaggtgcaaccccaaaggctcaatctcctcaaccgtgttgcaaatccacccatcagacttcatagaaagtgtaatctgtggaacaatgaatcttgaccagtcatcagtgccatcagctgctagaagaaacttatgcaatatagttcggttgaatttgtagttttgagggaaccccggaacgcaaaactcatcagagtcagttttcctgtgagggagattggaccagatagaaacataggccaaggttccataagcaccgcaagtggtgaagcttaggttcctaatacctaaactctttgcaacgttgttaacccagccaaggaacacgtcggatattgtgcaaagtggagggtgaccttcttcttctgtgatctgtgatatcaaggagcgaagtggaggctcaagggtgagtgatgcatgacagagtttcattagttgagtgagaggaagcttctctgtgttgtctatgttgggtggcaaaccgtgaagagtggagttgaagggtaactcagcaagaaggatttgatgattgggagaagttgaagaagaaagtgcagatcggaggtattgaatgttgaagggtgtgttggctatagtgatggtgaagcttgtgctttgttggatttgccttgctaatgccaggaatgggatgatgtggccttgggccatgaagggtaccatcaccacgtgccccttcttcttcttcttctttggtgtctccgtcatttgaacgagctcaaggaatggtatgtgctacaccctgcgctcagtgcgctggctttggtacaagaaaatggttgttgtcttggttgctgtttcacaaaataaagcactgagaaaaaggtgaatgaagaagtaacgtgacatgctacagagtcatagcctgttaggcttcaactttccctgtgccgggaccattcaacacctatttattttaaaattcaattaatacattttattttctttttcttcttgtcacgttatattatacttcatatttatatttttctctcttttgtcatactgttagtgtaaaatgacatatggatgtacaattatatttttcctaaatcaaactagtttttcagtgtgtcacgacttgactaccttagaaggaaaaaaagggtaaatagtttatttagttactaaattatgcattcgtgcgaataatttagtctttgcatttttgaaataatcaatttagtttataaatattgtgaaaaattaatttaatcgagtcatgtatatcgcatactaatttgtcaataaataatataatgattactctaacattaagtatcatattttaaaaaccaaattatcattatgtaatatagtttcaatgtaatataatttcaaaatccactgttaaattaaaagtttctttcctgtatattatatttataaaattttatattaataaaaaattatttgaaaattcatatatatatatatatatatgtatatatcaaaattgacatacaatatattttttaaaatatattaaaatataaattatatgatttcgtttttattgatgttcaattttcataaaatttagatattataaatcgtaggattaattggtattaatggtttcaatttgatgttaaccaagatagaaaaataatacagaatcgccttgttctagataaaatctaaacatggccaatacatagacgaaatcacctatacttatagagcgagcaggccaaatccaaacttgttctaaaaagaaagaaggtacaaggaaacaaacaactcatgaaccatgaaacaaaacttagtcctctaagtaaaagggagaaccgaaaaagaagaatacaaagcatttggagatttcaaatttattagaaaagtaagagccatacgaataggtcacccaatttcaaatacgcaatgtgagtcactatggtttaagcccaaaagaaacagaaccattttagcctaaattttttgacaatgcaaagcaaactcattaagtgtgggggcaactattcttgtcctcagggctaagggtttaggcctacatcaaaaaggaaagataacacgtgggtccaataccgataagacccaatatacctaacaaattatatcaagaaccttacgagcctaccaactccaattcaactatgaagtgcaatatctgataaaactaagttaaacaatgaacaacgaaaatcacaagattcactcctaaaacattccccacttctcatcacataagtatcattacctttaacgtattggggaatattataaataagtcaaagagttctcaagtgcactctttaacttctatactattaagtattagaacctatttggatataagacaaatatttttgagaacttttttattgaaaatataatatttttttcattagaaaaacttttaaaagtacttctaacattttatctaaacaaactcttaatctccttttggtaatactgacttgtgacttgagtatcaaaatccctataaatactttatcgaagttcaactcatgcagaccgagaagagatttcgttcaaatacccctccttctaaaccaatgtcaaaggcaatgtgaaagatgaaacatgattgtattgctttgagatgctggctagcgtagggcagcttctcatgtttcacaccctgtgagacgtttatgtaccgtctgatatattatttacaaatccaatggttcgaagatatgatggttaaccaataggatgacttgctaaatattaatttttaaataataatcagaatttttaatatctatatttaccttaacattgtcatcaactttgacaaataaattggcatcccataagtttattgcagcaaagtaggattttgtctttgatgacaatcaatttatccttcaacatgattatgcataaacaaagtatgaagaggtattagatcttgggatgagtttgtttaaactttaaaaaaataacttaaaaaataagtattttttaataatcatataagatttgtttcttaaaataaccaaaaaaactgttccagtatattaaatgtcttgaaatttgatcttatgccaacaacaataatcattcaattcatatcacctgtatcaaatatcaatgtcattcaaccagcctccgtccctctttggtcagctgcgaacagaggttttacagaagagaattagcactcacaactcaacaaaccccttcatatattgaccactcttaaccggaataatggaacaaaaatagggactcaaagcatgcccatatacactcatcaatctcaataaacattaatatcattactagagttaaccaataacccagtcaatcgttagtcaattttctgttttatcaaattagtttgttacttggtcttctctaggttagcttccaatccttggatgtaacattatagatagattagataggcactaaaatcatattgcaaacaagaagtgcagctttgtatttgaaatagagagaagggaaagtgataagacaataaattctgaaggtggaacaagaaaacaggaacattatggttataataattcagcacatttgaatatttgatgatacaaaccaagtagtaggatgatataacaattcagcactcatgcaagtcgtgttagtcttttcacatataataagttgctaattaacactttgaaagataaagagaaaaaagtataagtatgttgaaattgatggaatgtttataataaaaaggtgttcatatattacttcttatatcataaacatctattttgatacattttccccctgtcaaatcatattatttcacttcttatctctttctctctctttaggtgttatatatctaatagcatagaagtgtgtttataataataaggatattcgcatatccttactcaaatcaaactagcttttcggtgctgggggacctgactaccttggaaggaaaagaaaagttataaacgtccgccctatctatctatttggtttgaaggagagagaaataaggaaaataaaaggtaaaattaaaaaattatcttattaaattatatatatttgataaaattaacttatgaaatgataaatagtataaaataatagaaaaataataaaattataatttatttaaaaatggtaattagaaaattagataaatatattgaagataaaaattgaaaaaaaaaaaactaaaagttagtatttcaaaaaataataaaaattatgaaaaattactaaaaaattatttactgaataatcaaataaatttttgaactaataaaaaaattaaaaataaccttaaacgtcttgtggagccttagtcacacaaggttaaggttagcttgtttggctgttggctacataattttctctcttgatgagtacattatacgtctacccaacaatttcaacaagttcaatataatacctgtagcacattacttgtttttattacaatttaattcattgttataatcacttattcatacattactaagtaacagtacaactaattatttcccaaggtaatacatttcatagttgataaaagttctaattatattgctaaagctaattaaacatgcgtgtgtaatcttggataaactcaaatccaaacatagactagattcccaaacatataaaaattgatactctgcatattcttaatattgcaccgcacgtactaattttgatttcctgcaacttttttataaagcatttaagaaacatctcttaaaataaaaactcttaaaagaagaaaaaaaaaataaatattctcattagagtaatcacatatatacatttatactttttaaacaaataattactatttatcattattatttttcatatcacatcataatatttaagattattttctatgacaggatgtataataacatattcggtattccttttccttggcattacagtttcctatgttcgaaagacacttcccgttcacgaaaggcctaacatattcttcctaagcatgtcccacgacaccgaaaagctggtaagatataaattataatatgcaatcatgcacagtgcagtgcatacgtggagtgcagtggttcacgtttttgccgaacactctctgctatgtccatatgtctacttcatcttatgctttaagttgaataaatactcgttttcgttttagtcccgaaagtgttaaagtataaattgatccagctttctggatagaattttttttttttaatttaattaaaatatataaaaaaatttgtaacagattcatttgattaatttatatggtccggcactttcagcttcaaggacaaaaaatacgtatttatcctttgtttatagtttatatcctttttatatcagaaacccagtgaagggaatacgagtttataccttaagggttgagctacctccaatggcagcagagaagaaggggcacatcgtgatggtaccctttatggcacaaggccacatcatcccattcctggcactagcaagggaaatccaacagagaacaaaaagcttcaccatcaccatagccagcacacccctaaacattcaatacctccgatctgcactttcttctcctaatgaaatccatcttgctgagttacccttcaactctacccaacacggtttgccacccaacatagagaacaccgagaagctccctctcactcacatagccaaactctttctttcaacactcagccttgaagctcctcttcgctccttgatatcacagatcacagaacaagagggtcaccctccactttgcgttatatctgatgtgttccttggctgggttaacaacgttgcaaagagtttaggcattaggaacctaagcttcaccacttgtggtgcttatggaaccttggcctatgtttctatttggtccaacctccctcacagaaaaacagattctgatgagttccatgttccggggttccctcaaaactacaaattccaccgcacccaattgcataaatttctaagagcagctgatggcactgatgagtggtcacagttcttcattccacagactgcactttctatgaagtctgatgggtggatttgcaacacggttgaggagattgagcctctggggttgcaccttctcaggaactatcttcaacttcccgtttggactgtggggcctctcttgccacctgcttcacacagtggttcaaaacatcgtgcaggaaaggaacctggcatagcccttgaagcatgtatggagtggctggacttgaaagatgagaattctgttctgtatatttcatttgggtctcagaacactatcagtgcatctcaaatgatggctttggctgaagggttggaagagagtggaagatcgtttatttgggtcataaggccaccttttggttttgatatcaatggagagttcattgcagaatggttgccaaaagggtttgaagagagactgagaggcaccaaacgtggccttttggtgcacaaatggggaccccagttggagattctttcacacacttccacaggagcttttctaagccattgtggatggaactctgtgttggagagtctcagctatggggttcctatgattggatggccactagctgcagaacaagcatacaatgtgaagatgttggtggaggaaatgggtgtggctgttgagctcactcgaactgtggaaactgtgatctctggggagcaggttaagaaggttatagagatagttattgagcaagaagggaaaggaaaggagatgaaggagaaggcgaatgaaattgcagctcacttgagagaagccataacagagaaaggtaaagaaaaagggtcttctgttagagcaatggatgatcttgttagaaccattttatcacccaaggctttgtgatatgttgcatttagaatttggaatttggaatttggaatttggaatttgaatgatataataaagttgcttgtgtaagcatacttgtcatgaactgctcagcaatctttaacatttgactttgatcatgtcactgtgaagatcaaaagtacactttttttaattgatgatgatttgtaaacaaaaacaatatagaacgtcaatggatatgatctccataagttaactttttagtatataataatcataaattgatataactcatgaaaaccattaatatatgtgtataacgcaatctctgcaagtgcacatatcgtcctactacttcgcttatatcatcaacaatactcaattattataagttacagccattattcctgttttcctgtttcgccacgtttagaattgttatcttaaagaaaattagtataaactgtattaaacgtgtttttcattgaaaaatgtaaaattttcattctattaatcaatcaaaactattttttatcagtaatcaaaattatattaagtataatttttaaaataattataataaaagttactgtatattaaaaattataattgaataacaatgtaaaaattatttacacctccagtacatttaaattcattttgtattggaaaatagcatcattaattccagtttggtatttgaactcaaaattacccttcatatatcttccagaacatgccaaccgcatcgaaataatgactatcccgtttataatttaatttttttgaaaggctgtttacacttttacatccaatgttttttaatatatactaaaatgatttttttgtgaatagttactattcataaggtaattttgtcaccaaactaagatatgatttctaaaatttcactaaaaaatacctgcttttgtttgcctttttttctcccaaattcctaaacccatttctactcgttattcgttcggagaatgctcctccaccccggtgactggaaaggattttccaaacggttcctataaagtaaatctgttgcctatgatatgatacatgtacacaaatattttagacaacaaacttacaaaaaaaaaagagaaaaagacttcactacgttttctaagccatttgtgtattcagtggtcaccacatggccatcacgaagccatcttggtatgaaacaaaaatttgccgcttcacttacgaggcctttttgacataggttctgtctgtacatcaccctgtcaaatatgaggttttaggttaaactaaaataaattataacaagaaaatgaatatgtatgcaaagtgttctcaaattgtaattgtaatatacaagaaaagacactgaaataaacagagattttatcgggcattattacgggtgtgcttgattgtgttctctttttttttttttttcaaaattattttacaaagtaacatgcatgaaatatttttcagaagaaaataaaggcgaaaatgagaacacgaaaagaaaaattaacacattgattcgcctggtggcacttatttaggtaacagaaaacattgtgtaaaaagaaaaaggtaacaggaaacaacttacaggacccaagagttgctcacggatataggccattgatcgtagtacagcacccagtgtgtccttggtcacctgaaacttaacttcacttgcaccagaagtagtctccgcgactggaagctgaaacagtttaaagaatttcaacaatctaaaagtttgtcgaagtacatagccaaaaatcaaagaaaacattttcagaaggtgggatttccatacaataacaagtaacaaacatgcactcaatcccccatacagtaagaaataatacaattgatgacattctttttttggcttttgttctctttatctttccttttattctttatgggaagggggagacacaagccattgaggaaaaaaataatgaaaaaaacaaatgcacacttttttatatggacatatatatgacctatcaatgaacagatcttacatcatttccacaatgatttcaccctaatcaaataaaaatgctagacacatccacattgaacacaatcattactccacatatgtgctcctttcatcaaaatatggcctccaatttatccctatgaatgaggccaagtatttatccctatgaatgttctttatattttaaactgaatttggttaggccaatttaaagatattaaagtaaaaaatcaagtataatgtcatatcatgatattacaagttatctgcctcaacagcatcatgtcattttataaagctacattttcaaccgcatcatgtttgatacattcattaatagccaatatgaatgtgatcatacttaacaatttccccaataatcaatcttattgaccaataccaccatcctctgaaaaacaacagacagactagttctgttccctttcatttgttgccaatttaaataaaactaaaattctcttccttagtaatccaatcaataatatgtgctccttacacaaaaccttaccttataaatataaaaaaaaaaactaagtaccccattgcccaaaggctcctcgctatgcgaaggtaaaggggaggcatattacgcagtcttacccttgcatatgcaaagagactgttttgggattcgaacccataaccaacaagtcaccaatgcacaactttaccactgtaccagggctcaccctcatttacagccattcagtaagaagagaagtgctttaaggaattttaatcatgaaagtgcaaagcagcatcaatccctgcttttctagtactagaatactaaagtaacaaagcatacggctgagaaagataaatatataaggaacaaaatcacacaccttgagattcaatacagcaaacttcctagttggtatggaaagctgatcactgatgttgaccatatggttaaacaatggttccaaggtaacttttgagagattaaacttaacctccgattctgttgaaggaatcctgctataatcttgcaactgcattcaaaatatgtttaaaggacttaggatcctcacatagttgttatttgttaaaatattgcaagaggataaaagcaggacaccctgccacaattaaatgttacagaagatatttatacccaaaaaggggcaaaggttgtttgagtctcaaacttctcatgcaaaagaataggtatataaaccaactctaaactaaatcatgactcatgagcactactacaaatttttcatcgttcatattattatcagcacaccttaagactgataacagctactctattccctggtgttgagttcttgttctccattacccacgtcaatgatttcagacacggataaaccacctacatgataaagcacaaggaagagtttaatgccatgcagtccaattccaatcctaagaatacatcaaataaaaagaagaaaagaggttctccttcacataccatttcaggtggaccatcatctcgctggagagacactggggtcatttgtggtaaatttagatcagcaactgattgaacaggagtactagcatcattaagattaaacctctgtgttgtttcgtcctgcaaaggccacaacagagggtttgtatctgctgttgaagtaggggattttctgtcatcataagcagtcccactgactggatgactgggaggggcaactttggcaacacttctcctcatgaaagaaatcttctttccactttctctaagagcactaattgcagtatcataagtttccacagtcaatgccccttcttcagcatatttgatggcttcccaacaaaggttactatatcgtgatgtcaaagacttgggtccatgtgattcatcagcaagttcaactgatccagcactgctttttgcatttcttgtccaccgttttaaaatgtaatgagatggtaatgtaagtacattagtcacagtaaaaacagttagaacatgtctacatagaatgcctgaatactcaaacatttggcaactacagttagctctcaactcagaaaggtttaatgtgacaacatacgccttttggtcatcctcaaattttgcaaccctgaatatgctattttctccatcttcttcaattctgttggcagtataagcaaaagtttccactaactcttcttgaaactttgaaaatattttccgcgtatagagattagcagcctgcttctccatcggggaaggtgtcttcagaacaggggaggtacaaattgtctcataatctgattctaattctttttcaaaccagcagtccaatgcttgttcatactgcctaaagaacagtggtaatgttgtctggtggttgacaaaaccataaaaaaaagaaccatcaaatccttgattaggagatattgctgcaaaaaatgaatcacgaaaatatgctggaacccattgagcacgagcactgtacaaggactgaagccaatcatttttcgtgagttcatatttattgatgataaaattccaagatgaatcaaactcctcaatggtttcagtcagattaatacaattataaagttcaatctgaaaatttggatgcatgttgcatacatgagccaacttttcatggccttctcgcaagacttgccatttgcttatacaatggcgtgtttgaggaaaaacttgtgaaacagctgcctgtatggctctgtcttgatcggtagtgatagagacagggtaacattcgttcatcgctgtcagaaatgtcttaaaaagccacacaaaagaagcttcagaatcatccaaaagaagtgcacaaccaaacaaaatcatctgaccatgatgatttacaccagtgaatggagcaaatggcactccatattgatttattctgtatgttgtgtccagagtaactgcatcaccaaaatgactgtaagcagtccttgatcttgcatctgcccaaaacacattagacatatgattatcttcatcaagttgcattgcatagaagaaaccagggttctcagcttgcattttcttaaagtactccagcaggttgtgagcatccttccctaatgtcctctttcgagtaggtggcctaacagcataattcatcattgtaggacttttaaccggctgatttgtttcagcaacagcaacagcaacagctgcgggaatcttcttaattccatgaatatttttagtgggaatgcaattcttatccatagatacatacatcataccacttggaacaagccccactccttggtaagtttcaggcatggttcttccaacactagaaaagggcttacgtggccgaatattatgcactttactaatgctagccatggaatggctatgctcctttataaattttgtaacaacccacttattttgacccttcagctcgattctaatcattgcattgcagctttcaggaggctttcttttcgaatcttccctgccacacagaaactcccggtacatatttgccccatcagctgtagaacgaccatgcaggccagctttgcagctgaaacccactcgttttccatactcattgtagaaagtctttgcagcatcttcagaatcaaattccctacccacatatggctcagaaaccccaacccgaacatgagaaccagagttgttttcagcactactaactccaccttcactagattcagcatttccattgtctgccatagcttgacggtcacttccttctcccatgcttatcacttgtatgtagccagagttgcatgctttaatcctataaaatagaaagatgggttgtcttaaattgcctatacaccaagtaaacctcaaatattattaataatagaatgtagcaaaacaaagacaagaaccagtaaaaaagaaaaagaaaaaaaaagtgagcttcttcagattaaaagacaattgtcatttaccaaattaaggtgtgacacaaaaataaatctgtcccatcaaaactgagtcttatttaaagtgtacaataacaattcaaaactgacaggcatcatcagaaatttgacatagccaaaaacaatgctaacggaataaaagtttcatgtcaaataggtttaagctaaacaccataacagcatagctacaacacacaattttaatattcaattaattatcaccattgattatcacaaataggtcaaaacgcatacctagagatgaagtagccaatagaagttacaaaaatttaagtaaaattcacaaaagttaaaagaaaacaataaaaacagtaacggtaacaaaattcagtgtaaaaattaagcgaaaaattggaagtcataacttacagcgatgaaaactaagtgtggtgttaataaagctcgtgaaataattagagtgttccaaatcgggggttgaggaatcgcagaaacgcgtgaacggtgagggaatgagagagagttagggttccgcagctccgggcggttgcagagtcagaggaggaagaagcgtgagcgtgagagtgagtggatgtagtgttgcataggttagatatgagtacacacgtcatccttaccgtttgatctatatcatacggttatgattcgcttagatcgaaatctattttaatgggaacttccttcgtttttctgtcttttgtggtgggatttctcacgtgcactgtgcaccatccatccatcgctgtgggatccacaatcgcatagcatatacaccgtacattttgtttatgattatattttattatttcacatttttcactttccacttctcttttttttaatatgtttttttacatgtctaattttctatttttaattatctttttattatttttgaaaaaaaataccttattattattcaaaaaaaattaaataaaaaactaatataaatttatatctaatatagttatattatattattacaatctctttcatcattaaattaaaattaaataagtaaaagactaatttagcctcgaaatgtcaatacaccattttaaatactcaatatatagatttaggataagactcttgactcaataaaagttagaataacttttaaaaatattcttgttcaaaaaataataactcctaaaaatcctttgttgtattgtagcattaattgtttcatgaaagaaaatttaagtgggttaagtcatagttaacacttgctatttgaaactaatatgttattaagtagaaagagttatgtcctaattatcatttataacttttggcctaataataaacgctcaatccaacaattaatatcataattaaggtcacgagttcgattttcaacagaacaattattgagaaagaaattaattatttgtgaggttgtgacattaattatccttgaaatgaaagtccaagtgagtcaagttataaaaacactcttattcaacaaaaacactttcatttttaannnnnnnnnnnnnnnnnnnnnnnnnnnnnnnnnnnnnnnnnnnnnnnnnnnnnnnnnnnnnnnnnnnnnnnnnnnnnnnnnnnnnnnnnnnnnnnnnnnnnnnnnnnnnnnnnnnnnnnnnnnnnnnnnnnnnnnnnnnnnnnnnnnnnnnnnnnnnnnnnnnnnnnnnnnnnnnnnnnnnnnnnnnnnnnnnnnnnnnnnnnnnnnnnnnnnnnnnnnnnnnnnnnnnnnnnnnnnnnnnnnnnnnnnnnnnnnnnnnnnnnnnnnnnnnnnnnnnnnnnnnnnnnnnnnnnnnnnnnnnnnnnnnnnnnnnnnnnnnnnnnnnnnnnnnnnnnnnnnnnnnnnnnnnnnnnnnnnnnnnnnnnnnnnnnnnnnnnnnnnnnnnnnnnnnnnnnnnnnnnnnnnnnnnnnnnnnnnnnnnnnnnnnnnnnnnnnnnnnnnnnnnnnnnnnnnnnnnnnnnnnnnnnnnnnnnnnnnnnnnnnnnnnnnnnnnnnnnnnnnnnnnnnnnnnnnnnnnnnnnnnnnnnnnnnnnnnnnnnnnnnnnnnnnnnnnnnnnnnnnnnnnnnnnnnnnnnnnnnnnnnnnnnnnnnnnnnnnnnnnnnnnnnnnnnnnnnnnnnnnnnnnnnnnnnnnnnnnnnnnnnnnnnnnnnnnnnnnnnnnnnnnnnnnnnnnnnnnnnnnnnnnnnnnnnnnnnnnnnnnnnnnnnnnnnnnnnnnnnnnnnnnnnnnnnnnnnnnnnnnnnnnnnnnnnnnnnnnnnnnnnnnnnnnnnnnnnnnnnnnnnnnnnnnnnnnnnnnnnnnnnnnnnnnnnnnnnnnnnnnnnnnnnnnnnnnnnnnnnnnnttaagaacaaattttatccttttttaaagtttgagtttttatccttttaattttattttataacctttttagtttctcactcataaatttatttttaaaatattttaaaataacggctaagatcaattaagtcaaagcaccttaataagacgtttatttcaaggtataatattacattagcagaattcatattcacaaaaatatcgtaattagaaatattagttttttggggtgagaaattagaaatattattcttccactaattaatatatatacgtaataaaagataacgttattttcgctctaccacctcaatcttattactcatcctataatctcacacatttccctattttatctaattttatttataaaaattgttaaaaaattattatataataatgatagtcattattattatttccattaaataaccattaaagaaacatgatgaaaagaaaaaatatatatgataaaataaaagtaatttatattcgtgtatctattctctgtttgatcctaattttctagtttgaccctcattttcttcctaaatctgtctttcctttttcaaggtatcattgcttctattctctgttttactacctgtttctttcctcctcttcaaaattggataaggacattcataatttactctttcctaaattaaacagtgcatgtgatgaaagcaaagtttaaaaaaattgtcgtacgttcttaaaagaatgttacaagatactattcaggttcccatgatcgctctattttggaagctattcctacttcccttagtgcatctttggatatcaaacaaaatcgattctaaatccaaaagtcatggtgaataattgaaattagagaagcaacaacaaagtgttgcattgctgtgacagtagaaaaataagcatgcatggtgtggcgatcgcaccatctacccaaagtgttgcttttgatcctggctgacacaagtggtgtgtctcttgtatgcataggatcacgcctaagtgcttatagttagttaattctcttaataaattaaaataaacattgtcctatgttcttaaaagaatgttacaaggtattactattaggttaaatgatataactcaacatatgacaatggaatgaaattgaagcacccaagtcaagaatgacaaaaccaaaggatgagaagaaaagaagaagaagcttagagagaaataacatgagcgaaggggagttttgtgggatcaacctcgttattcttttgcataacacttttggaaagcctcaagagattcctgatttggcaaaatagccttggcgttaacgtcatgcatgctcctcgcaaacaaacacctgcatgactcactcgccgcgttaaaaagctccacgtccctgttattctaacctgggattctgcggcggagacggaggtgggtgtggcggtggcttcgtcgccggacattgtgtgtgtttgagagattgagagtaggtacgttttttcttttctctctctcttttctcttatacagatatatgagtttttgtctatgcgtacgtaaatgatggagccaaattaagtaggacattatatttcgctgctgccaaggctaatcataactcagtggtagtttttgttttttgtgagagaaaaaatatattggaaaactcgaaccaaagaataatacgagatcgagataggaaaaaaaaatccaatacataaaactgttataaaattggatcgtatatatgaacacaatatttctaaattattgcatatgcatatcaaaattcagatcaagatgggaaaatttattcattctttcgtctgtatcaacaatatttctaagctcatatatgcgttatgcgtgcagtagtgattggttattataattcattaatacccagagattagactgatgatcgatcactaattctgagtaagaggtggagtacaatattgtttacttcaaatacaaaatcatgagatacacacagtgtgctcttaagatcatcatattaattgggaacattcaatgttcagttgttcattggtataaaaaataagtcaaagatacgaattaattaataaattgtattatttataataaatagatggataatcaaaaagatttaacccttgagcagtgtatatgagtttataaatctcttatgattgttttcgatacctacaaatgaataaaaaataatatatgcacgatgaactggataatataaattataatttatatattgtannnnnnnnnnnnnnnnnnnnnnnnnnnnnnnnnnnnnnnnnnnnnnnnnnnnnnnnnnnnnnnnnnnnnnnnnnnnnnnnnnnnnnnnnnnnnnnnnnnnnnnnnnnnnnnnnnnnnnnnnnnnnnnnnnnnnnnnnnnnnnnnnnnnnnnnnnnnnnnnnnnnnnnnnnnnnnnnnnnnnnnnnnnnnnnnnnnnnnnnnnnnnnnnnnnnnnnnnnnnnnnnnnnnnnnnnnnnnnnnnnnnnnnnnnnnnnnnnnnnnnnnnnnnnnnnnnnnnnnnnnnnnnnnnnnnnnnnnnnnnnnnnnnnnnnnnnnnnnnnnnnnnnnnnnnnnnnnnnnnnnnnnnnnnnnnnnnnnnnnnnnnnnnnnnnnnnnnnnnnnnnnnnnnnnnnnnnnnnnnnnnnnnnnnnnnnnnnnnnnnnnnnnnnnnnnnnnnnnnnnnnnnnnnnnnnnnnnnnnnnnnnnntgatagacattcaataaaaagttaccttggcgtcacattatattaataaatacaatgatcaataacagatgtacatataagaattaaatataatttgagttcctcaaatttgaagtgttatcgaagaaatgtgtgcataatgttgacatgtgttcattttttgtaagttagaaatgaaaaaaaagtgttcttaaataaagaagtaagaaaaaacaatttagtaattttaatcatcattatattaagattttaaagtttttcttactaatttactattttaaaatactaattcttcaaaatctaaaatgtcactatgaaaaccacaatgatattataaaataatttgttgataaattaatttttgtgatgtaatattaatttaatattgttttttagatgattaatttgataatatttgttttttttttaaatactttttcttgagttgtcctggaaaaggtagccagaaggtcgttggcatattcctttctcaacctgtggatctcaatcccattttctttctttgtcgtcgcagacattaccacacaacacaaaccctaattgcattttcttaccccaatctctctgctcccgcttcgcttcatcactcttctcaaggtattttacgatctctctcccattcctttcccctctattttcctcctcttaattagatcctttaggtttttctttttgtcccttttgatcacatcaaacttcaatcattcttgtttttcactaattccattagtaattttaggattcctccacccttaatttggacatcgattgttgcttagcttggggttaacttcaggtttcccgattcgttatttttctcggcttcggtttgggaattttgaatttgttacgttctagggtttgagctttcaaccctcttgattcatagagtaggatcctcattttttatggcatctgagtgcccgaatggtactgaggtttatcaaagtttagcacacttaatagcaaatccaggcataggcatagttgaatctaatctccagctttgtcccaaatccttcactgaaggaatagcaacctcaaaatttatgcctgctaacaaacctgaatctgggaagggtgtgaagttaaagggagcatccaagattaattccaagaaaggcatcaacgcccctgtcagtgccttgaactactcctcaattcctgatgtggttttcaattgtggtttgtccatcaccgaccttcctctggcattgatatctgagattctcaattgccttgatcccaaggatcttggtgttgtttcgtgtgtctccacaattttccaaagagttgcgtccgagcaccatgcttggaagcaattctactgtgaaaggtgggggcttccggcagcttccttggctgtggattcaggtgttgtgtatgatgataagtcatggagggaacttttcgtggaaagggagtttaggagtaagacttttatgggacgttatagtattgatgtgttgtatggacatactgaagcagttcggactgttttcctattagcttctgcgaaggtcatatttacctctgggtatgactctgttgtgaggatgtgggacatggagaatgggttgtcaattgcatcatcacgaccccttggctgcaccattcgtgccgttgcagcagatagaaaactattggttgctggcggtactgatggattcattcattgttggagggctgttgaagacctgcctcacttgtttgaacttagagccacacaaaaccagaatactgaggttcgactctggggacatgaaggtcctataacttcacttgctttagacttgacaaggatttacagtggttcatgggacacaactgttagagtgtgggaccgtaattcaatgaagtgtactgcagtgttgaggcacagtgattgggtctgggcacttgtccctcatgatactactgttgccagcacatcaggttcggatgtgtatgtttgggatactaatagtggaactttggtgaccattgttcataatgttaatgttggtaatacttatgctttggcacggagccatacaggggacttcctttttactggaggtgaagatggtgcaattcacatgtatgagattgttagggttggctatgagtgtaaaacttggcatgttgctgcatgggttcctcactcggcctctgtgtattcccttgcctttgagtttccatggcttgtttctgcatcaagtgatggcaagctggctctaattgatgtgagaaagctgttgaggataagcaagcgagctctggggaagagagtttcaaaggtaaagaatttgggtggagacatagtagagcctccacagaggatgttgcatggatttaagtgcaatcttttctctgtggatataggagctgaacgaattgtctgtggaggtgaagaaggtgttgtcaggatctggaatttcacggaagctttggaaattgaacggagagcccgtgcattaagaggaatacgattagagaacagaatgaggcgacggaaactccagacagagctgagcaataaaagtggccggagtgatcagtgttcagttgcagcgaagaagaattctgtcccttgtatttggcccaaacgtgggatgagcggaaagctgaaagcatagtgactgaggcagtctaatgtttgcttatatgcaccaattgacaatccttttttttcttttcaaaattgatgaatacgatattttagtttcaagcaggtaaactgacctgaccactctctttacgtattatgatatgattagtttctgtaggtagtgatcagatcagactacaccactctacatttcaattggtacgattctgaaactgatagtgtttctttccaagaattgttcttacaattttacaggtggtgtttctacaagaattctatatgatgtgcatttgataactcagtattgacattcgaccatcgatttaaacagattcaggatgctattgtcttgatagattgcaggagtgggctcaatgattcttgcttctgagttctatgaaactgatagacgagacgaaagcatttgcacgagaggctatggtagtaatacgggaagctggggtggtgatagttagtcatttatgtttgatgacgagcttattcttagatatgctcattactctccgaatcaatttgttcagtctaatattttcgaagttaaactatttatttggtctatatagttgtctttcattttaagtttagtctttacactagaagactataagttttatgtatgttaagtcttggttcctattgccaacacaagataacattttgtgactgtaaaatttctacaaaacttgcaacattttgtatatggattaaaatttaaaatagaaaccactataaatatcaagtgaatagtataacatgtttttaatctcgtggatgtgtgtaacaaaccaccaatcattttatgaaagaaatcgaaggacgaaagaagcaactggctccagttttttgttttgcagagtagtgtctatatgataggcgtatcatgtttaccaaaattgcaccaggttacacactagttttgagagtgcttatgcactcttcatgaaagaagtgctctaaccccaattctataaactataagctggtgtttgtcaataacagaaatcattaaagtttattaccctaagtcagattagattcgaattatttgtatttgaaaatattatagatgatgttttgtaaagaaaattaataaatactatatttaaatctgcagccatcaaatacaaactcgactgtgtgcagttagaaagacgatcagtttacgaggatttcttttaggaaatttttacaatgacgaggtcaagacttaaatttgaaataggaaaatgataagataaatgagaaaggtaattacaaaaaagtagtagaaattaatttgataatagatttaattagaactaatttaggaataaaatcattctagaactgaaatagtgactaatttttttttaagtgattgatttgataacttatgtttttttttaaactaatacaatctactatataatatgagagaatgtcacatgatagttccatattcatttcctccaaaataataaattcaataataaatacaattgatatcatttttattatttattcattaatagtagttatcttttaaatagttaccttaattataatatatttctttcaggcaaattnnnnnnnnnnnnnnnnnnnnnnnnnnnnnnnnnnnnnnnnnnnnnnnnnnnnnnnnnnnnnnnnnnnnnnnnnnnnnnnnnnnnnnnnnnnnnnnnnnnnnnnnnnnnnnnnnnnnnnnnnnnnnnnnnnnnnnnnnnnnnnnnnnnnnnnnnnnnnnnnnnnnnnnnnnnnnnnnnnnnnnnnnnnnnnnnnnnnnnnnnnnnnnnnnnnnnnnnnnnnnnnnnnnnnnnnnnnnnnnnnnnnnnnnnnnnnnnnnnnnnnnnnnnnnnnnnnnnnnnnnnnnnnnnnnnnnnnnnnnnnnnnnnnnnnnnnnnnnnnnnnnnnnnnnnnnnnnnnnnnnnnnnnnnnnnnnnnnnnnnnnnnnnnnnnnnnnnnnnnnnnnnnnnnnnnnnnnnnnnnnnnnnnnnnnnnnnnnnnnnnnnnnnnnnnnnnnnnnnnnnnnnnnnnnnnntaaatgcaattgatatcatttttattatttattcattaatagtagttatcttttaaatagttaccttaattataatatatttctttcaggcaaattaaaaaaatattttgcaattaaatttttgcacttactatttaattttattttttttatataagttttattttatatatattttatttcgacaatagtatgacaaattatggtatccatgataacgattgttataaaataattatacaaaattatttaataacattttttactatactaaaatgtaaaccttgcaaataaaaattataaaagattgtattattgatgaaaaatattcctacgtgaatatttgattgaattttaatcacaaaaatatttatttattttaataaagtttcatttcttataacatttattcatgaaaatatttaatgaacatattatttttgannnnnnnnnnnnnnnnnnnnnnnnnnnnnnnnnnnnnnnnnnnnnnnnnnnnnnnnnnnnnnnnnnnnnnnnnnnnnnnnnnnnnnnnnnnnnnnnnnnnnnnnnnnnnnnnnnnnnnnnnnnnnnnnnnnnnnnnnnnnnnnnnnnnnnnnnnnnnnnnnnnnnnnnnnnnnnnnnnnnnnnnnnnnnnnnnnnnnnnnnnnnnnnnnnnnnnnnnnnnnnnnnnnnnnnnnnnnnnnnnnnnnnnnnnnnnnnnnnnnnnnnnnnnnnnnnnnnnnnnnnnnnnnnnnnnnnnnnnnnnnnnnnnnnnnnnnnnnnnnnnnnnnnnnnnnnnnnnnnnnnnnnnnnnnnnnnnnnnnnnnnnnnnnnnnnnnnnnnnnnnnnnnnnnnnnnnnnnnnnnnnnnnnnnnnnnnnnnnnnnnnnnnnnnnnnnnnnnnnnnnnnnnnnnnnnnnnnnnnnnnnnnnnnnnnnnnnnnnnnnnnnnnnnnnnnnnnnnnnnnnnnnnnnnnnnnnnnnnnnnnnnnnnnnnnnnnnnnnnnnnnnnnnnnnnnnnnnnnnnnnnnnnnnnnnnnnnnnnnnnnnnnnnnnnnnnnnnnnnnnnnnnnnnnnnnnnnnnnnnnnnnnnnnnnnnnaaaatatatttaaatatttcttaaaatttttactaacatatatatatatatatatatatatttattaaaatttaaactaaaaaattaataattatttaaatcttggttgttgtggtgaaagaacagtttaagtttctactccccaacacacacgaaggaacaaacgcttaaggaaaaaacgtgggacacagcatacacgaacgacaatttacgcggttagattgtcaattgttatcgttattcatgattttaatgttcttctaactttagaatttaagttgtatgaagcatcttgtacatgtgaaacaaaaattaaaagtaactaataatgcattgacacgtctcctactacattaaaaaacgttgtttactttatcactattgcgtcttcgtgatgtgatattgagttctcattgctttttaactttcttcttagctagttccgtttcaaagttgagcctacaatgacaggactatatagagatataataaataaataaataaataataaaaagtctaacataatatcttgttttactaccaaaattccttaactttatagaggtaccatagaaattctataataataataatattattattattattattattattattattaatannnnnnnnnnnnnnnnnnnnnnnnnnnnnnnnnnnnnnnnnnnnnnnnnnnnnnnnnnnnnnnnnnnnnnnnnnnnnnnnnnnnnnnnnnnnnnnnnnnnnnnnnnnnnnnnnnnnnnnnnnnnnnnnnnnnnnnnnnnnnnnnnnnnnnnnnnnnnnnnnnnnnnnnnnnnnnnnnnnnnnnnnnnnnnnnnnnnnnnnnnnnnnnnnnnnnnnnnnnnnnnnnnnnnnnnnnnnnnnnnnnnnnnnnnnnnnnnnnnnnnnnnnnnnnnnnnnnnnnnnnnnnnnnnnnnnnnnnnnnnnnnnnnnnnnnnnnnnnnnnnnnnnnnnnnnnnnnnnnnnnnnnnnnnnnnnnnnnnnnnnnnnnnnnnnnnnnnnnnnnnnnnnnnnnnnnnnnnnnnnnnnnnnnnnnnnnnnnnnnnnnnnnnnnnnnnnnnnnnnnnnnnnnnnnnnnnnnnnnnnnnnnnnnnnnnnnnnnnnnnnnnnnnnnnnnnnnnnnnnnnnnnnnnnnnnnnnnnnnnnnnnnnnnnnnnnnnnnnnnnnnnnnnnnnnnnnnnnnnnnnnnnnnnnnnnnnnnnnnnnnnnnnnnnnnnnnnnnnnnnnnnnnnnnnnnnnnnnnnnnnnnnnnnnnnnnntgttaattttgtgtttacaaaaataaaatattcaaaactggttactctttttttttgtgccccgttcaatataattgtgacccaaagtacaaaaataaaatataatcattttacaagtttctattaaagaattatcaaacatgttacttgtcattaaaaaatacgaactagagaaataacaaaataaatgaaaggctttgaagcagcgtaggctataaatagaagtttgtgaattgaaatggttgtatccaaaaatcctctctagttatgttgttgagttgaaaggatgaatatgaataagaatgtttggtggcttctactcccatactttctcttccttcttcttcttcttttacttccttcttcttcttctttctgcaaccatgatgacagctctgccttgctacaactcaaatactcactcgacacttcaaatgattttccttccaaaacagaattttggaacaacggaacagattgttgtgagtggcttggggtcaagtgcgacatcatctcaggccacgtgattggtcttgacctatcctttcataatatttttggtgacattccctccaaaatctctcacttgtccaaattactgtcacttgatttccgtagcaactactatatgcatggtaatcacttcgacttgatagatgatgattctcacaactacccgagaatgagaattgatccatacacttggaagaaactcattcaaaacgcaaccaatttaagagagcttaatttagatggcgtggacatgtcttgtatcggagagagctctttgtcattgctaaccaatctctcttcctctttgatctcccttagtcttgcagccaccaaattgcaagggaatctatccagtgacatcctctctttacccaatcttcaaaaactatatctggatcataataaagacctcggaggtgaacttccaaagtcaaactggagtactccactaagagacttggatctctctcatactgctttctcgggaaacatccccggttccattggccatttgaagtctcttggcacactatatctggggggttgcaattttgatggactgcttccctcatctgtctttaatctaactcaactctacactttagatctatcatttaataaattaattggccccattccatattggtgttattctttgccttccttgtcattcttggatgttagcaacaaccacctcacggtcaattgacttgagtggtcatctggactttcatcaattttcaatgttcaataatctagagcacctcaatttttctcacaatagttttctctctattcactttcaaagtaccgcattcaaaaatctaaatcacctcgatctttctcacaatagttttctctctattcaatttcatagtactgcattcaaaaatctaaatcacctcgatctttctcacaatagttttccctctattcactttcatagtaccgcattcaaaaatctaaatcacctcgatctttctcacaatagttttctctctattcactttcatagtaccgctgattcaaagttcaaaaatctaaattacctcgatctttctcacaatagttttctctctattaactttgatagtaccgctgactacatcttacccaaccttcaattcgtatatttatcttcctgtaatattaatagtttccctaaattcttagcaccacttcaaaatctggtcgcactagatctttctcataacaacattcgtggaagcattcccccgtggtttcatgagaagctcttgcattcctggaataacatttggcatattgatctcagtttcaacaagttgcaaggagatctcccaattccacccaatgccattcagagctttttagtctcaaataatgagctgactgggaacattccttcagcaatgtgcaatgcaagctacctcaagatactcaacttggctcataacaacttgacaggccagattctgccatgcctgggaacattgccttctcttttggcattggatttgcaaaagaacaacctttacggcaacatacctgggaacttttcttattacggaaatgaattggagactataaagttgaatggcaaccaattggatggaccattaccacggtctttgatcttctgcacaaatctggaagttttggacctgggagccaataacatagaggatacatttccccattggctagaaagcctccagcagttacaggtactcagtttgcgatcaaataagtttcatggtgtcatcacttgtttcggtgccaagcatccatttcccaggctgagaatttttgatgtctcaaataacaattttagtgggcccttgccagcgtcatgcatcaagaactttcaaggaatggtgcgtgtgaatgatattgatagccagagtggttcgaaatatatgggtaacgacaatttctataatgattcagtagtggttgtaatgaaaggtcaagaggtggagctcaagacgatattaaaaattttcacaaccattgatttatcaaataatatgtttgaaggagaacttccgaaagtcattggagaattgcattctctcatagggcttaacctttcgcacaatgcaatcactggtaacattccacgatcctttggtaatttaagaaatttggaatggttggacctttcatggaaccagttaacaggagagattcctgtggcttttaccaatttgaattttctggcaatgttgaaactttcacaaaaccaccttgagggaatcatacctacaggtggacaatttaacacatttgaaaatgattcctatgttggaaatccaatgctatgtggatcccctttgtcaaaatcctgcaatgaggatgaagaaaggccaccacattcaacatttcaccatgaagaatcaggatttggctggaaagctgtagcagtgggatatgcatttggttttctatttggaatgcttttgggatataatgttttcatgactgggaaaccacaatggctagcgagacttgttgaaggtgtgcttaattaattaagagtgaaaaggacaaatcataggggaagaaaatagtttactcttagtttattatggttcttttgtgtgtctgtatgttttctgtaattttaacttctgtcatgtggaagaaatatcgtctctggtgagtgatctatttcaagttgtttccaaataagaaaaaaaatgtgatgagtgctttggtttcaatgtcaagcaattaattttccgtaaattgacattatattaggaatatatatacagttctctggaagaattctggctaacccaattaaatgtacaattgtatcattgtattttcagatatagttagttcatgatgaatgctgttcagcatcaaagctactgtgaaaagaagtagaaaaccaacctttcggtagttttagaattcactgccgatgaaggttctgtgggtcttctgtctttttctttactaacagcactacagaaaagtccattagtttaagatcggtatgtttttgcttagtgaaaggactttatgccaaaactccaaccagaaagagtaggatttcttatttgccaaaacacaaggctatccttgaaacaaagtatttaatagtaaaagacggagaatttgcatacaaatggattgtcgcttgagttaaaaccttctttcaactctctgttctacaaacagatattgaagttgataattgagcctgatacagcctctggaaaaactgatccatatgcattacaaaatttctagacaaaggcatcagagggtaagcatgttcttgaaattaagggtagaggtaacattagaatcagataatgtacctcaattgttttttaaaataaaaataaataaacaaacataatatcagagaaaaatgttagtgatcagaggatgagagggatacatatcacaggcataagccaagtaatggaacaaatctcaagaggttgcacattgattgataaaaatacagagaaggtatacggtgctctttttatactatctattaagcgattaacatgtaattaaccatgatgaattaagtgattaactaactctaagtgaattttactagtctcctaataacacacgtgggagacgataatcttttcattcctagcgagaagatatcaaaatgagtgatcatcccatattattggctcaaagactttgatgcttatctccaaagataaaaacttaaaagtggacttttaaattaaaaattggtttcacctacccctgttattacatactttctccaaagaaaaatccctaaccaactcagtccaattatttattaattttgccgaatgatgatggtagatgtgcccaggccactgtgtccctttgggaggttccttaagcgaaaataaataaaccaaagtcaccataacaatgtgttaggaaaaaatataggaaacctattaaaaattcatatcaaaagataaaataaataaaaagtaatactaacaatataatcttgtttaacatttttttatcattgactaaatttgatgtgaattctattacaaaatttgagtaatgggatttactgtaaattaaaacatctcaaactgtcatttttctttatctgtatttgtatgtttaaacatcttaatagtgtgtctcttttcatctaccatcttttatcactattttaaatttgaatttcaatagttcttacaaaaataaattatcaatagttaaaaataatattatatcataatttaaattattcattataaatttaaaatataatttatatattaaaagtattgctgacacactttttattagctgaattttaaaattatttatttatgatggattttaatgatataaaaataaatttaatatgattctttcgtgcgatgcgtcttgttttctgaaattttaacttttgtcttttgtggaagaaatctcacctctcctgactgatctattttatttcaaataatcaaattgtttgcaaatacgaagaaaaaaaattgtgaagaatgcttttgttttaatttcaagtaactaattttccgtaaattatctagggtaacctgcataagcatcaaggagaatttgcacattgaaccttcaatcgacacacaattggcattatattaggaacatatgtacagttttctggaagaattaggctaacagaattaaatgtacaattgtatcattgtattttcagatgtaattagttcatgatgaatgttgttcaggaatcaaagctactgagaaaagaaaaaaagaaaattgaaaatgaaagtaacataagaataaaaataattttaatttttaatacaagctggtaattagctccttaaggttactttctagcatcattccaaagtcttccttttcttttggttgcatcttatttctctgcttcatagtctcgtgggttgctatttggaatgctcttgggctgtaatttattatttttgaaaatccaatcgatgaacacccctatccttcatgatgtcaaatttacacgacctaaaactctcaaatatacaagtttcataaacaaaagtttcagaacattttgggggtagcagataattgtaaagccatatgctaggcctatgcagtaaaaaaaaaaaaaaaaaattaaagaaatagggtgctaccgcactgcaacactgttgggtatgctttggaaataatttctttattagaatcacacagcacaaaatggttttggtatcgacattaaactatgcatttacaatattaaataagaacttgaaaaaaaaataacaaatgtacaactttactaaagaaaatgtaattattaatatattattactaaaacacatggaaggaacaaagtagaaaaccctacatcacatatattgatccaaaatcctaactctctccatggctgtgaaaattcaaactagtttttgtttacctacattctccattccaacttcaaaaccctacttaaactcgttcaccgtctcagcctccaaatccagctctggccgtaagctccgggcgacagtgattgatggtggcctcgctggatcctccgcagcagaggccctagcctccgacggcgtcgagaccttcctcttcaaacccaacccagcatccgtcgtgaagccatgcggcgcgccatccctctctgcatgctcgaagagtttgacattcctcaccacctcatcgaccgccacgtgatgttcatgcgaatcttctccccttccaacatcatcgttgacttcttcaaaaccctaaaaccccacaagttcatggccatgctccgctgcgaggtccttgaatccttcctccgctcccacgcacatgctgcaaagggtttttttttacgtagtaacgtgtccaggaacgctctggtggaactgtgtggggatgagtatgtccaacgcatgatgtttgagaactatttgtataagaagttggcacgttggagagtgttggatgatgctaagcttttcttcaataccattggaagcttggtgagatctaaagtgttggaaacgccacgcatggagagtttgatactatgactttggaaatcccactaagtgcatgcagcttctgcgtcattttgacgtggttttgttgcttgaatgttgatccaaaacgtgtttccaaacatgttttaaataatttgtttctgtaatttctgtgtactgtattattatgtaagcttctaacagaggcacttttgaatttgaagcaatgatggattgatcaccaattcaacaacacttctttaagaattgttttattcaaatacaaaagagcagtatacaatatttcatttgttgctgtcataattcaaaggcttaaataaagcaacaataaaacttatacaagaatgagctcatctgtccgtccaatcacacatcgaagacactgtccttcaatcaataaatcaaaggctttgttgatatccttgaactccacctcgtgtgtgacaaacccatccaaattcagttcctgttgataattgcagatgaaatttagtaccaaacaaatgcatcatgaaaacttggaaattgttattattattttacatagtcatcactatgttaatagaagggatcaagagcatagacacactaatgctaatgtgacgaatagctcacatgtatcagcattgtatgtgttaggggatttctcggttgattgtggagacaacactctgttctaccctctgcttcatggtcgtctctctttgtatccatgtaacggctccgatgccacccttcttcctcaactatttggtacttttctttatctttttcttcatcatttggactctgcattcgtgattcaagcaaattggacagaaccacttaaatctcacatgcaggatgcaggaagttataatttggaaccattgcattcgtgtcaggataaaataaatcttctttcagtgattcttgtaagtcctatcatggtgaatgaaagcatatttcctttcatttttttctgcataatgtgatctgaattaatgtattacgatagctgcccatttatttgagcaatttatcccataatcatgatctatagtctcgcttaagtgacatcaacgaaacaatggaatgatggagattatcaacgaaacaagggtttatggtgtgcttttcctcccttgataacttcaaattgaaaatttaactatgctatatgttgagtttcatcaagcatttgaaatctctttgggctgtcagaatctacaaaaccaatctgttcctttatattgtaagaaatttacaaacactcatgtgaaacaactgtatcaagtgttctttatacaggttttgaagacatgaagagtgcatgttgtggacttggtttcaatggtgccatgatagggtgtctccatggacatggtctgtgatcaagcttcaactcatgtttggtgggatttgttcaaccctactcaagcggtcaacaaaatttagactttgcaaatgaaaattatacaaaattgtatgattaatgaaaatattcctccgtgaatattttaataaaattttgtttcttataaaatttgttcatgaaaatattcaaggaacaaattatttttttttgaaactagtttaatttaaaacagaatgaggcgggatcagtgttcagttgcaacgaagaagaattctgtcacttgtatttggccctatgtgttgttgcatgtattggcatgtcccatcatcatcatcatcatcatcatcatcatcatcatcatcatcatcatcatcatcatcatcatcatcatcatcatcatcatcatcatcatcatcatcatcatcatcatcatcatcatcatcatcatcatcatcatcatcatcatcatcatcatcatcatcatcatcatcatcatcatcatcatcatcatcatcatcatcatcatcatcatcatcatcatcatcattatcatcattattatcattattatcatcattatcatcatcattattattatcattattattattattattattattattattatcatcattatcatcattattattattatcatcattatcattattatcattatcattatcattatcattatcatcatcattattattatcattatcattatcattatcattatcattattattataataaccttggctttatacataaagaaaaaggaaaaagaagtttaaattttctatttttcggtcgcaaaagatatagcgacggctggagtgccacgcctggggcgtgggatccacgcctggagcgtgggaagtgctccagaaagtggatttcctctggaatgccacgcctggggcgtgggagccacgcctggagcgtgggagctcgggcagggccattatttaaagcccaaaacgcgaaaattgaaagagaaagacttcttcttcttccttggacgtcccagcagccattgttgagcttccaagcttcaatcttgctccatagttcaccaaattaagccccttaaacatcaatcttgatggaaaacacctagtgagcttaaatctcccatccattttccttgaaaaaccccaaatttgagaatccctttctcaagggaagttcttgaaacttgagttcggcgaggaacggcgacgatttgtgagtacccaagctaggggaagttgtttttgggccatccttgtcgttattgaggtaagaaactcaagtttcaccgattaatttgttgattggggttttgggtgaatagtgacccacttgagatagagctagaattagccttgggtcctttagagagatgtgtttagaacgtgttggggatgaaagattagctctcaattgttagtttggtgaactttggattgttggctctatgtaaagcatgtgttgttgattgagctgaattggttagtttaattgacatgttagagccatagtatgtgttttgttgtgccttggaggccatgaaaacggtgccattgtgtgtggtgtgaaccgttcaagcccggtgtgaattctgtggaattgggctattgtggtgagctttgagctctgtgtgctttggctaggccaagctagacctgtgagggtctgagaatcacttgtgaagtgattgagtgtgtactacacactgtggattatgcttcttgttgttctcacggcttaagaccgttgttgaagcattatatgtttgatgtgatgtaggacgtgagaccgagagtttcggtggtggtgatagtgaagccgggagagccggtgctttgctcagagcaggtaagctcttgatccttgattgtatgccctttgttgtgttctaccatgcaccatatttgggtgatggttctgttatgggcatttgcatgtatatagaaattgtatgttgacatgcttgactgatgcatggtgaatctgaaaccgtgatgggaattgttattgagatgattatgttgatgtgattgaatgataaattatgatctgaaacccgtgatgggaattggtatgaaaatgatattgatctgagattgctgagatgtgcttggacccagtgattgggtaattgctatgaatggttgactgatattgtgttcgctaaattgcgagaatgaaatgtgaattctatgattgaattgtgcatcctatggtagtaggatagatgacgagagattgagtaagacctgatgtgagatgttcctgtgatatagatgtagcctcccgaatggagatgttcctatatctacagatgtagcctcctcaggcaattgattgatgtaggatgtgagatgttcctgtggtatagatgtagcctcctgaatggagatgttcctatacacagatgtagcctcactagacggagatgtgcctgttacatagatgtagcctcttaagtgagatgttcctatgtttcagatgaagcctccaagagatatgttgtggtccgggcaagagatgttcctagtatatagatgtagcctccgtgagtggagatgttcctatatacctagatgtagcctctgccggatgatgtgctgtgtaccacctgtttgtagacaggatggggtgataccatagaagtggtatgtgtgaaggggatgagaccctgtgtgacttgatgatgaatgagaaatgttatgtgattgatgtaatgtactatttctatgtatgtgcctgaaagtgaaccaggggaaggaaataccttcaagggccctgagtttactgagattttatatctcaccccttgtgtggggcttatgttttgcaggtgagtcatcagcaggagcagagagatcccaaggcaagaagcctatgcagggatagttgctgattgaaaaccttaggcttagatgacatgagcatgtggctctggtattttgagtagcctttggttttgatttttgttgtaccctgaagggatattgtgtacaattttgtacttaaacagtgaatttgtatatgaacaccatattataatgtacaatgtgtatgttatcggcatttgttgatgcccttttatataatgcttccaaactgcttaatctctgatgtattatgtctgataatgactgtttatccgtggtaatcacccggtgcgtgtaaggggtgatacaattatcattatcattatcattatcattattattatcatcatcattatcattattattatcattattattattattattattattattggaagggtctttactatttgcttaatttttctaacagtcttagacatctcctctgaccattctggaggattttttctaagtctctcatataacaaggcacactcaatcctaatttttggaataaaatcagctatataatttatgcaacctaaaaacctttgtaattgttttttatctttaatctcatctggaaatttttctgtaaattctatggatctctgtattggtataatggaccacaaatgcagttttatatttatcttcctctctcaccgaaatttgatagtagtctgatttcatgtcaaatttggaaaaaatagatgcattaaataaccttttaatcaaatctggtttatttggtaaagggtatcttatccattttaaaactttatttaagggtttataattaattactaacctaggagttcctcgttctatttcagaagccttcataacataaaatcctgaacaactccacggtgatttagacggtcttattaatcctttttctaaatattcattaatttcctttttacaatgttctaaatattgttggttcatttgtatgggcctagctttagtaggtatatctttttcattaaaattatctatataaggcaatcctatttcatatttcttcctatgccaaaaagctattggattattttcgcatatttcttttttaattttcttttcaattttttccttcttttctttaactatagtgttttgtaattgttcttctattcttttataatggagttccttatttaacatattaatctgtttcattttatttttaattattttgactgacgaattttttattatatttaattctctttctctagggggattaataaattcaaaaacaacttctttacctataacttatgtttttattcctttttctgttacttggaaagggtataatagtgataaaaatggtgttcctagaattatttcacagttcatatttttnnnnnnnnnntctctttctctagggggattaataaattcaaaaacaacttctctacctataacttatgtttttattcctttttctgttacttggaaagggtataatagtgataaaaatggtgttcctagaattatttcacagttcatatttttaattaatacaaatgaagtattataacatattccatttttacaaattcttgcattagataatttatagttaattttcatttttgagccattagcactagatatattttctacggatttctcataatatttagtaggaattaaaccttcttgaatacaatttacatctgctccagaatctattaatgctacaaacttaaaagtttcttctttaattgttaaagttatttcacaatatatgccatttatgagtaataattaaacttaatagattaataaaattttcttctttttccgaattattagattttgaagtactggccatattggtttgttgttctctaattatattatttccttctaattctaaaattctatattccaagaagccagttagatattgaggcagataaagaagcattgtttttagcccaaaagagtcagataatggcagaactagctacggctacctctcaagaagaatttgaagagaagatccagagaatgaaggggatatctcaagactagaaatcgataaaagatgaaggaagcagttccagcaccaatccttatcacaaaaatagggatatgctggattacttcaccaaagaagaattatccgaataaagccaaaaccccaagagccaatcagaagtgtcggcaaggcaaataaagatagtgggataaaaagcagtctcaacaaccaataagaagtgtcggcagaagacagaggtactgctgacaagataaaaagatacctgtctatgtacataggagtgttttatataacgtgttttgtaaaagtcttactttttagggtcactgttgtaaatatttaagtaagtttggaatccggaccgtgtgttgtatctatatatagatgtaaataaaccagaaagaggcatcagccttttatcctaaccttactcttgtttctataacttcaacattccttctcttatcttccgtgcatcaatactcctgatcataatcgtactaacctaccttcaagaatatttaagtaagttttctaaatatgaattctgaaatctttattcctgttgatttctttcatgttttaaatatttataccagtttccaatattgtaatgatcatatacatatcagcgtaattattgaatatcaaaatatttacctaaggtttattaattattattattattattattattattattattattattattattattattattattattattacattccattcgtaatgaccaaaaggtaccgcaaaagcagttttttaatggtttataattaattactaacctaggagttcctcggtctatttctgaggccttcataacataaaatcctgaacaactccaaggtgactttgagggtcttattaatcctttgtctaaatattccttaatttctgttttacaatactctaaatattgttgattcatttggataggtctggctttagtaggaatatctttttcattaaaattatcaatatatggtaatcctatttcatatttcttcctatgccaaaaagctattggattggtttcacatattttttgtttaatttgcttttcaattctttctctttcttccttaattattttactctgcaattgttcttctattcttttatagtgaatttctctatttaacatatttatctgtcttgttttatttttaattatactaactgacgaattttttattatatttaattctctttctctaggtggatttataaattcaaaaataacctctcttcctattacctctgtttttannnnnnnnnncccaaaaacaaataactctaaaagatttacaagaagaaattaaaatacttaaacaggaaattagagaattaaaacaacatgatataactttagaatattaatttattctaaaaatattaatcaacatatagaacatttagaaatatttataaacattataaaggaaaatggattggtagtctcagaaaagaaaataaaattattcgaaactaaggtaagatttttaggatatgagatatatcaaggaaccattataccaatacagagatccataaaatttacagaaaaatttccagatgagattaaagataaaaaataattacaaaggtttttaggttgcataaattatataattgattttattccaaaaattaggattgagtgtgccttgttatatgagagacttagaaaaaatcctccagaatggtcagaggagatgtctaagactgttagaaaaattaagcaaatagtaaagacccttccctgtttaggaatacctgattcttcagcctttcttattgtagaaattgatgcgtcagaattaggatatggaggaatattaaaacaaagaatctctccactagctaaagagcaagtagtcagatatcattcgggtatctggcatccttcccagaaaaaatactctgttgtcaaaaaagaaatacgtactttctatagttttatgtttacaaaagttttaagatgatttatttaataaaatttttttaatacgaacagattgcaaagcagcacctttggttttacaaaaggatgttaaaaatttggtttctaaacatatttttgcaagatgtcaaagtttattatcttgttttgattttgagatagaacatataaagggagaaaagaattttttaccagattttttaacaagagaatttttacagggttcagaatgaacaagaaaccagataaaaagcctctaaccaaagatcaatacggatccccactggattccaataaaggttctgacaaagcaatagtgcctctggcaaatactggatcatccaggttattaactaaccctaacctaagaccaaatatattgtcccatgtagttagaagcccaacaccaaatacaaaccggtatacacctttgcaatatatcaataccctcgtgggaccaagagactttgataaaccagcctcttcaaaattaaccaatactcaaacattccaaaccaataccgatacagacccagactatattaaaaaggacgataccttgtccataataatagcagaaaaacattggctaaaactacctccagtagagttagcagaaaaaatattccctaaagacctcccatacccatgtccagataccaatgggtctcctataaaattttgaattattgtaaaaataagggttgctactgcatcttgttcttgggtttcctgttttatactatttaatattaaatttctatcttcttctaaacataaattatcccaccaacctttaagttggcctgtaaatccctgaactatggctactgctgtatttctatctgaaattcccttagtcttataagcggttgcaaccatattcatctgacaagttaaatctagtatttgttgttcactcatcccatctatattccattcagctatttctgatcctgaatatacattttgacgcatatctcccctttcctcaaattgtacatctgttggggaaggtctagaataataatttctaagtttaggataataatttgttcctctctttaatttattaatttctaaattattatttctttctaaagtattaattgaaactttttctatacttaatttttctaaatttcttcttatttcttcaattttatgatcagtattatttcctaatcttattgaatctaaatctttttgtgaaacgttcataattttatatataggtttatctatgttcttttttatttctttattttcagctttcttttcctcttgtgcattgttttctatcctagttaaatgagtcgaaatagtatttaacataatattagaataatttaattggtgatataattttctaatatcttttatttctattattttttcttctaatacttctttaaatggagatgcttctatttctaagtttgcgacattaatttttactcctttagctggcggatattccgattctattatcttatcatctgtagttttccataccgttgtattcttagttaatggattaatcactttttctttattaaacatccaatcaaagaaataaatattaatttcattttcttctaaatacttataatattcttgtctaattttatccctttcagtatcttcgtatgtactaaaaaaccattgtctattatccttattatattctgctaagaaatcttgtttaatccattctttatctattttaaatggttctatttctctagttaaaacatttaatacctgtgacctagttggagaatatcttggtgatgaattatcatcttgatatatgggtctagatacctttggattactattatctattcttgttaaatccaaatctatagttgttccacttatcgaatgtctagatgattgtcctttataaatcacataaggttcttttatatttaatgactgtgatctatttagtcttaatctaatatctgtaccatcttctataatttctctaatttgtgtattatgtattttgggtggttctaaaatatcctctattttccattcttcaggaatattttttaaaacttcttcatgtcgtaatctttttggaacttgtacctgagatttatgcaaattagcctctactaatattgtctcatctttattagatgctcttagtgctctaaaattataatttattttagttactttataatatattctaaaaattatctgtacgggatctgttactcctttaactatattttggggaacctgtatatgtaattttattgaggtacttgtatatttatttcttaaattcattgaaaaatttgggtaacaattaaaaaagcatgggccatcatgtaaattactctctaatatagctattactgaatctttgaattggaccaatcttgtatctcttaataacattaatattggtgtattaactcctaatcggtaattaggttttgtggccacttgtattaatcctagatgaataaaattaaatcctttatatatatgttcatttaatatgttttgttctaaaatatttattattttattctcttctgttcctgggtaactatattctacaatatgtatttcatctttgtttttatccgaggaaaatatgctatgttttttataaacttcacttttctttactaaaggtattgaccaattatgtaatgatttttctatatcttctactataactttatcattacttatcatatctatagattcttccatattggttaattgttgcggagttcttacaactatttgtttatctttatttccccttcctatttcactcagacttctaactatattagctattttacttcttgattgagttgctgttacgggaccacctctttccatttctaggctaaaccaacggacttacacacttacaactgctgggaccacctagacacaagaagctgaccaacgtatacacacctctcagtgttacactcaactcgatctggaaatagaataactcttatagatggaaatctttatggaatattaaggaaaaataaaaaaaaactttaaactgtataaaactctttaacaatattttgattttttagtggctctgataccactttcggaagctaaacttgatacaaaaatattaataaaccttaggtaaatattttgatattcaataattacgctgatatgtatatgatcattacaatattggaaactggtataaatatttaaaacatgaaagaaatcaacaggaataaagatttcagaattcatatttagaaaacttacttaaatattcttgaaggtaggttagtacgattatgatcaggagtattgatgcacggaagataagagaaggaatgttgaagttatagaaacaagagtaaggttaggataaaaggctgatgcctctttctggtttatttacatctatatatagatacaacacacggtccggattccaaacttacttaaatatttacaacagtgaccctaaaaagtaagacttttacaaaacacgttatataaaacactcctatgtacatagacaggtatctttttatcttgtcagcagtacctctgtcttttgccgacacttcttattggttgttgagactgctttttatcccactatctttatttgccttgccgacacttctgattggctcttggggttttggctttattcggataattcttctttggtgaagtaatccagcatatccctatttttgtgataaggattggtgctggaactgcttccttcatcttttatcgatttctggtcttgagatatccccttcattctctggatcttctcttcaaattcttcttgagaggtagccgtagctagttctgccattatctgactcttttggactaaaaacaatgcttctttatctgcctcaatatctaactggcttcttggaactttattatttcttgcccattgtaacattttctctttattaattaatttcacatcaaacttcttccaccactttatttttacttgtcttgaaagaaagtataaatctgtaacgttatctgccttgacgtatgtataagtccagcacattatccatgttattccttgggaggctatgaaagacaaaaacttataaccatctacaaaggttgtattatctttaaaaaatctgtataattcatctacttctggagggaacacttctctcattggtccaaagttaaaaaaccatttgatgaaccattttgggaattttaacgatataccttttttaaaccacagaaaccaggaatgtttatctggcttcatataacacattattccaggcggtcatgtagtcgtaataactgtattcttgagggacaaagcttctggaaaatctcttggttttatgtaatggctgtccccaatcaatatctgacaatacattcagaattttgagctttgaaaactgtataactccattattgtcttcgttatggacgagttctatagagtcggtatcaatgagaataaactcataaaatatcctggttttattggtatctggacatgggtatgggaggtctttagggaatattttttctgctaactctactggaggtagttttagccaatgtttttctgctattattatggacaaggtatcgtcctttttaatatagtctgggtctgtatcggtattggtttggaatgtttgagtattggttaattttgaagaggctggtttatcaaagtctcttggtcccacgagggtattgatatattgcaaaggtgtataccggtttgtatttggtgttgggcttctaactacatgggacaatatatttggtcttaggttagggttagttaataacctggatgatccagtatttgccagaggcactattgctttgtcagaacctttattggaatccagtggggatccgtattgatctttggttagaggctttttatctggtttcttgttcattctgaaccctgtaaaaattctcttgttaaaaaatctggtaaaaaattcttttctccctttatatgttctatctcatcaaaacaagataataaactttgccatcttgcaaaaatatgtttagaaaccaaatttttaacatccttttgtaaaatcgaaggtgctgctttgcaatctgttcgtattaaaatttttttattaaataaatcatcttgaaacttttgtaaacataaaactatagaaagtatttcttttttgacaacagagtattttttctgggaaggatgccagatacccgaatgatatctgactacttgctctttagtttgtggagagattctttgttttaatattcctccatatcctgataccactttcggaagctaaacttgatacaaaaatattaataaaccttaggtaaatattttgatattcacttggtgcattttttaatccaaagggcattacattccattcgtaatgaccaaaaggcaccacaaatgcagttttatatttatcttcctctctcaccgaaatttgatagtagcctgatttcatgtcaaatttggaaaaaatagatgcattaaataaccttttaatcaaatctggtttatttggtaaagggtatcttatccattttaaaactttatttaagggtttataattaattactaannnnnnnnnnnnnnnnnnnnnnnnnnnnnnnnnnnnnnnnnnnnnnnnnnnnnnnnnnnnnnnnnnnnnnnnnnnnnnnnnnnnnnnnnnnnnnnnnnnnnnnnnnnnnnnnnnnnnnnnnnnnnnnnnnnnnnnnnnnnnnnnnnnnnnnnnnnnnnnnnnnnnncaatcctatttcatatttcttcctatgccaaaaagctattggattattttcgcatatttcttttttaattttcttttcaattttttccttcttttctttaactatagtgttttgtaattgttcttctattcttttataatggagttccttatttaacatattaatctgtttcattttatttttaattattttgactgacgaattttttattatatttaattctctttctctagggggattaataaattcaaaaacaacttctttacctataacttatgtttttattcctttttctgttacttggaaagggtataatagtgataaaaatggtgttcctagaattatttcacagttcatatttttnnnnnnnnnnnnnnnnnnnnnnnnnnnnnnnnnnnnnnnnnnnnnnnnnnnnnnnnnnnnnnnnnnnnnnnnnnnnnnnnnnnnnnnnnnnnnnnnnnnnnnnnnnnnnnnnnnnnnnnnnnnnnnnnnnnnnnnnnnnnnnnnnnnnnnnnnnnnnnnnnnnnnnnnnnnnnnnnnnnnnnnnnnnnnnnnnnnnnnnnnnnnnnnnnnnnnnnnnnnnnnnnnnnnnnnnnnnnnnnnnnnnnnnnnnnnnnnnnnnnnnnnnnnnnnnnnnnnnnnnnnnnnnnnnnnnnnnnnnnnnnnnnnnnnnnnnnnnnnnnnnnnnnnnnnnnnnnnnnnnnnnnnnnnnnnnnnnnnnnnnnnnnnnnnnnnnnnnnnnnnnnnnnnnnnnnnnnnnnnnnnnnnnnnnnnnnnnnnnnnnnnnnnnnnnnnnnnnnnnnnnnnnnnnnnnnnnnnnnnnnnnnnnnnnnnnnnnnnnnnnnnnnnnnnnnnnnnnnnnnnnnnnnnnnnnnnnnnnnnnnnnnnnnnnnnnnnnnnnnnnnnnnnnnnnnnnnnnnnnnnnnnnnnnnnnnnnnnnnnnnnnnnnnnnnnnnnnnnnnnnnnnnnnnnnnnnnnnnnnnnnnnnnnnnnnnnnnnnnnnnnnnnnnnnnnnnnnnnnnnnnnnnnnnnnnnnnnnnnnnnnnnnnnnnnnnnnnnnnnnnnnnnnnnnnnnnnnnnnnnnnnnnnnnnnnnnnnnnnnnnnnnnnnnnnnnnnnnnnnnnnnnnnnnnnnnnnnnnnnnnnnnnnnnnnnnnnnnnnnnnnnnnnnnnnnnnnnnnnnnnnnnnnnnnnnnnnnnnnnnnnnnnnnnnnnnnnnnnnnnnnnnnnnnnnnnnnnnnnnnnnnnnnnnnnnnnnnnnnnnnnnnnnnnnnnnnnnnnnnnnnnnnnnnnnnnnnnnnnnnnnnnnnnnnnnnnnnnnnnnnnnnnnnnnnnnnnnnnnnnnnnnnnnnnnnnnnnnnnnnnnnnnnnnnnnnnnnnnnnnnnnnnnnnnnnnnnnnnnnnnnnnnnnnnnnnnnnnnnnnnnnnnnnnnnnnnnnnnnnnnnnnnnnnnnnnnnnnnnnnnnnnnnnnnnnnnnnnnnnnnnnnnnnnnnnnnnnnnnnnnnnnnnnnnnnnnnnnnnnnnnnnnnnnnnnnnnnnnnnnnnnnnnnnnnnnnnnnnnnnnnnnnnnnnnnnnnnnnnnnnnnnnnnnnnnnnnnnnnnnnnnnnnnnnnnnnnnnnnnnnnnnnnnnnnnnnnnnnnnnnnnnnnnnnnnnnnnnnnnnnnnnnnnnnnnnnnnnnnnnnnnnnnnnnnnnnnnnnnnnnnnnnnnnnnnnnnnnnnnnnnnnnnnnnnnnnnnnnnnnnnnnnnnnnnnnnnnnnnnnnnnnnnnnnnnnnnnnnnnnnnnnnnnnnnnnnnnnnnnnnnnnnnnnnnnnnnnnnnnnnnnnnnnnnnnnnnnnnnnnnnnnnnnnnnnnnnnnnnnnnnnnnnnnnnnnnnnnnnnnnnnnnnnnnnnnnnnnnnnnnnnnnnnnnnnnnnnnnnnnnnnnnnnnnnnnnnnnnnnnnnnnnnnnnnnnnnnnnnnnnnnnnnnnnnnnnnnnnnnnnnnnnnnnnnnnnnnnnnnnnnnnnnnnnnnnnnnnnnnnnnnnnnnnnnnnnnnnnnnnnnnnnnnnnnnnnnnnnnnnnnnnnnnnnnnnnnnnnnnnnnnnnnnnnnnnnnnnnnnnnnnnnnnnnnnnnnnnnnnnnnnnnnnnnnnnnnnnnnnnnnnnnnnnnnnnnnnnnnnnnnnnnnnnnnnnnnnnnnnnnnnnnnnnnnnnnnnnnnnnnnnnnnnnnnnnnnnnnnnnnnnnnnnnnnnnnnnnnnnnnnnnnnnnnnnnnnnnnnnnnnnnnnnnnnnnnnnnnnnnnnnnnnnnnnnnnnnnnnnnnnnnnnnnnnnnnnnnnnnnnnnnnnnnnnnnnnnnnnnnnnnnnnnnnnnnnnnnnnnnnnnnnnnnnnnnnnnnnnnnnnnnnnnnnnnnnnnnnnnnnnnnnnnnnnnnnnnnnnnnnnnnnnnnnnnnnnnnnnnnnnnnnnnnnnnnnnnnnnnnnnnnnnnnnnnnnnnnnnnnnnnnnnnnnnnnnnnnnnnnnnnnnnnnnnnnnnnnnnnnnnnnnnnnnnnnnnnnnnnnnnnnnnnnnnnnnnnnnnnnnnnnnnnnnnnnnnnnnnnnnnnnnnnnnnnnnncttgttttaatattttaatttcttcctgtaaatcttttaaggttacttgtttttggggaagaaatctattataaatttctttcatatctactcccctaattggttctctattagtttggtcttttattattaattcattaagttgtcctatgaattcttctctgataggagaatcttctaattttcctattatacttatcaatgcttcagtctggtctctagttaatatattaatagttttacaatgcttacacgtacatatttctggacctaagcaataattatcttcttcttctgactcacttaacttactactgctagtatcttcttctaaatgatataacatattatcttcagatcctgattctgattctgtatcatcttcttcctcttgttctgaatttaacacgatttttagtaattcggttttaacatcttcgtctaattctaattcattaattttctgttgaactgtacatctattggcaaaatgtcctagctttccacacttccaacagacattttctttttattctgatttagttttttatgtttcttattataagagggtttataatttttattatagtctctaaaattatccctatattttttatgatatttctttttagagtatattttactacttctaatttttctctttttattctgtgtactgggggctcttattacctctattccatattgatgacaaaaagttcctaattcttttctatttgtcatgctttcctttctcatcttattctgaagtttaaaatctgtacaaacttgtattcctgtttctactattatattatgaatctgtccaaaagttaatttttcatatgagattggattttgaaaatgtctttctaagtttatccttacttttttgaaaataacttaggtaatcctgatataaatttttctttccagtatcctgcatatccatcttcccttaatgttattttggagaaaaatgtatctttataccatctataatctgacatagttggacaatataatttatttaattgactagcgattcgttctttaaatatattagggtctcctataaaattttgaattatagtaaaaataagggtggctaccgcatcttgttcctgtgtctcttgttttatactatttaatattaaatttctatcttcttctaaacataaattatcccaccaacctttaagttggcctgtaaatccttgaactattgctactgccgtatttctatctgaaatccccttagttttataagctgttgctgccatattcatttgacaagttaaatctaatatttgttgttcactcataccatctatattccattccgctatttctgatcctgaatatacattttgacgcatatctgccctttcctcgaattggacatctgcgggagaaggtctagaataataattcctaagtttaggataataatttgttcctcttcttaatttattaatttctaaattagtatctctttctaaagtgttaattgaaactttctctatacttaatttttctaaatttcttcttatttcttcaattttatgatcattattgtttcctaatcttattgaatctaagtctttttgtgacacgttcataattttatatataggtttatctatactcttttttagttctttgttttccattctcttttcttcttgcggattattttctatcctagttaaatgattagaaatagtattnnnnnnnnnnnnnnnnnnnnnnnnnnnnnnnnnnnnnnnnnnnnnnnnnnnnnnnnnnnnnnnnnnnnnnnnnnnnnnnnnnnnnnnnnnnnnnnnnnnnnnnnnnnnnnnnnnnnnnnnnnnnnnnnnnnnnnnnnnnnnnnnnnnnnnnnnnnnnnnnnnnnnnnnnnnnnnnnnnnnnnnnnnnnnnnnnnnnnnnnnnnnnnnnnnnnnnnnnnnnnnnnnnnnnnnnnnnnnnnnnnnnnnnnnnnnnnnnnnnnnnnnnnnnnnnnnnnnnnnnnnnnnnnnnnnnnnnnnnnnnnnnnnnnnnnnnnnnnnnnnnnnnnnnnnnnnnnnnnnnnnnnnnnnnnnnnnnnnnnnnnnnnnnnnnnnnnnnnnnnnnnnnnnnnnnnnnnnnnnnnnnnnnnnnnnnnnnnnnnnnnnnnnnnnnnnnnnnnnnnnnnnnnnnnnnnnnnnnnnnnnnnnnnnnnnnnnnnnnnnnnnnnnnnnnnnnnnnnnnnnnnnnnnnnnnnnnnnnnnnnnnnnnnnnnnnnnnnnnnnnnnnnatcatataaggttcattgatgtttaatgactgtgatctatttagtcttaatctaatatctgtaccttcttctataatttctctaatctgtgtattatgtattttatgtggttctaaaatatcttctattttccattcttcaggaatatttttaaaaacttcttcatgtcgtaatctttttggaacttgtacctgagatttatgtaagttagcttctactaatattgtctcatctttattagatgctcttagtgctctaaaattataatttattttagttactttataatatatcctaaatattatctgtacgggatctgttacacttttaactatattctgaggaacctgtatgtgcaattttattgaagtacttgtatacttatttcttaaattcattgaaaagtttgggtaacagttaaaaaagcatggaccatcatgtaaattactctctaatatagcgattactgaatctttgaattggaccaatcttgtatctcgtaataacattaatattggtgtattaactcctaatcgataattaggttttgcggctacttgtattaatcctagatgaataaaattaaatcctttatttatatgttcatctaatatattttgttctaaaatgtttattattttattttcttctgttcctggataactatattctacgatatgtatttcatctttatttttatctgatgaaaatatactatgttttttataaacttcactctttcttattaacggaattgaccaattatgtaatgatttttctatatcttctactataatcttatcattacctactatatccattgattcttctatattagttgattgttgtggagttcttacagctatttgtttatctttatctccccttcctatttcactcagacttctaactatattggctattttatttctagattgagtcgctgttacgggaccacctctttccatttctaggctaaaccaacggacttacacccacttacaactgccgggaccacctagacacaagaagctgaccaacgtatacacagctttcagtgttacactcaactctttcttgaaataaaataaatcttatagtttgaaatctttataaaatattaaggaaaattaagataaagtgctagctgtaaaatttttttaacaatgttttgatcttttagtggctctgataccacttctgggaacttggtatgaagatgttaacaaaacttatataggtactttgaaattcaataattacactaatatgaatatgatcattacaatattgaaaacttgtataaatatttaaaacatgaaagaaatcaataggaataaatatttcagaattcatctttagaaaacttacttaaatattcttgaaggtaggttagaagggatatgaccaggagtattgaagcacggaagataagggaagaaatgttgaagatatagagaaagtgtgaagttaggataaaaggctgatgcctcttctggtttatttacatctatttatagatacaacacactgcccggatgtattcctccggatttcaaacttacttaataatattcaataatgacctaaaagtaaaactattacaaagcacgctacataagacactcctatgttcatagacagatatctttttatcttgtcagcagtacttctgtctcctgccgacacttcttattggttgttgagaaagctggttattctgatatctttatttgccttgccgacacttctgattggctcttgatagttttgtctttattcggaaaattcctctttggtgaagtaatccagcatatccctgttcttgtgataaggattggtactggaactgctaccttcatccttgattgatttctggtcttgagatattcctttcattctctgtattttctcttcaaattcttcttgggaagttgccgtagctaattcggccatgatttgacttttttgtgctaaaaataatgcttccttatctgcctcaatatctaactggcttcttggaactttattgtttcttgcccattgtaacattttctctttgttaattaatcttacatcaaacttcttccaccactttatttttacttgtcttgaaagaaagtataagtctgtaacattatcggccttgacgtaggtataggtccagctcattatccatgttatcccttgggaggctatgaaggataaaaatttataaccatctacaaaggttgtattatctttaaaaaatctgtataattcatctacttctggagggaacacttctctcattggtccaaagttaaaaaaccatttgatgaaccattttgggaattttaacgatattccttttttaaaccaaagaaaccaggaatgtttgtctggcttcatgtataacacattattccaagcggtcatgtagtcgtaataattgtattcttgagggacaaagcttctggaaaatctcttgggtttatgtagtggctgtccccaatcaatgtctgacaatacattcattactttgagttttgaaaactgtatcactccattgttatcttcgttatggacgagctctatggagtcggtatcaatgagaataaactcataaaatattctgattttattggtatctggacatgggtatgggatgtctttagggaatattttttctgctaaatctactggaggtagttttagccaatgtttctcgtctattattatggacaaagtattttcttttttaatgtagtctgggtcagtatctgtattagtttgaaaggtttgagtattaactaatttggagaaggctggtttatcagtctcttggtcctacaagggtatttatatattgtaaaggtgtatacctgtttgtatttggtgttgggcttctaactacatgggacaatatatttggtctgaggttagggtttgttaataacctggatgatccagtatttgccagaggcactattgctttgtcggagcctttattcgaatccagtggggatccgtattgatcttttgtgaggggctttttatctggtcttttgctcattctgaaccctgtaaaaattctcttgttaaaaaatctggtaaaaaattcttttctccctttatatgttctatttcaaaatcaaaacaagatagtaaactttgccatcttgcaaaaatatgtttggaaaccaaatttttaacatctttttgtaaaatagaaggtgctgctttgcaatctgtttgtattaaaaactttttattaaataaatcatcttgaaacttttgtaagcataaaactatagaaagtatttcttttttaacaacataatattttttctgggaaggatgccaaatacccgaatgatatctgactacctgctctttagactgagaagaaacttgttgttttaatattcctccataacctaattctgatgcatcagtctctacaatcagaaaagctgaaggatttggtattcctaaacagggaagggtcttaaccatctgtttaatcttcctaacagttttagtcatgtcctctgaccagtctgaaggattctttctaagtctctcatataataaagcacactcaattctaatattaggaataaaactatataatttatacaacctaggaatctttgtaattgttttttatctttaatctcatctggaaatttttctgtaaagtctatagatctttgtatgggtataatagttccttgatatatctcataacctaaaaatcttatctttgtttcaaataattttagtttcttttctgacactactaatccgttttcttttacaattttaataaatatctctaagtgttctatatgttgattaatatttcttgaataaactaatacatcatctaaatatactatagtaaaatgggaatatttataaaatatgtcattcatgatattttgatattcacttggtgcattctttaatccaaatggcattacattccattcgtaatgaccaaaaggcaccacaaaagcagttttatatttatcttcctctctcaccgaaatttataaatcatataaggtttattattattattattattattattattattattattattattattattatcatcatcatcatcatcatcgttatcatcatcatcatcatcgttattatcatcatcattatcatcgttattatcatcatcatcatcatcatcattatcgttattattatcatcatcatcatcatcattatcgttatcgttatcattattgttatcattgtcattattgttatcattgtcattattgttatcattattgttatcattattattattattattattgttattgttattattgttattattattattattattattattattattattattattataatatactactactactagctactacttcacaaccattgatttatcaaataatatgtttgaaggagaacttccgaaagtcattggagaattgcattctctcaaagggcttaacctttcgcacaatgcaatcactggtaccattccacgatccttttgttatttaagaaatttggaatggttggacctctcgtggaatcagttgaaaggagagattcctatggctttgatcaatttgaattttctggctgtgttgaacctttcacaaaaccactttgagggaatcatacctacaggtggacaatttaacacatttggaaatgattcctatgctgcaaatccaatgctatgtggattccttttgtcaaaatcctgcaataaggatgaagattggccaccacattcaacatttcaccatgaagaatcaggatttaatttggctggaaagctgtagcagtgggatatgcatgtgggttgctatttggaatgcttttgggatataatgttttaatgactgggaaaccacaatggctagcgagacttgttgaaggtgtgcttatttgaggagtgaaaagaacaaataacagaatccatgcaaattgacaaggaatgcattagtttactatggttctgtattatatgtgtttatcagtatgtatgtatgtatttttttttttataattttatcttctttgtttgtgtaatgaaatttcgtctctcaatattatcaagtgatctatttcaagtttttgtgcaaacaactaaatttagagatcaatcaattttgttttaagttcaatttatttgctataaattgtgtaattagtcgtatcctgcaaaggcattgaggaaagtttacgcgtccaaccttaaatcatcacaaaaatcagcattttattaggaacaatgttggacagttttcttgaagaacttggattttcccaattgaacatacaagagaatcagtgtatattagattttccaaacaagctagatttgtgttttattgtttactagaagccatactaattaccgcagtggatataaaatgaagcaggaattcaacatgctacactttcaactgagactattttaacaggatttttttttctattgaaatcgattaagatttttgaccaactttaatcgagaccatttttgctggcatcaatggcccaagccggaattagcgaaaagatagtcttgatcgacgtccctccaaaatagctttagttgatgtgaccaaaaaataatatcgactaacattgatcagaaaatatcctagctgacgtagctcaggccgatatcgacaaataccatgatccgtcagtgtcagtcaaaaaaacataattggctaatgtggactgaaaaatctaactaacatcaaccaaaaaatagtcaaaaccaatgttgaccgaaaaaatcctaacctatgtcaacaaaaaataaccctatctcacctcgacaaaaaaaattaccgaccgacattgactgaataacctagctaaccttgaccaaaaaatattttcacatcgattgacatcggcaaaaaaccctaatagaaattgatatcggtcaaataataaatattcctttttgggtggtatacgagaagctgctcaatcgattagttattaaataccattaattctatgtgtgttatggatatctctacgtgcgattcattgagatagaaattttttgatactatttgctatacccctctctttatagtactttgtattaaagtaggaaaataaatggaatatatatctatttaatttttttatttattttttgcattcggattgaaatttaatgagatagtaatatgagtgcaataaaacaacttcttttgaatataatttatagaatactatattaattatagttaatagaaaagatgatgattatagaataatatattaattatagctgcccatttatttgagcaatttattccataatcatgatctattgtctcgtttaagtgacatcaggcacacacatgcatcatctctttctgtaagttcttcactggtaaattagaggggtaccaaaattatctgttatttctgcagaaacttttcaatattgacttacgatgagcataactaatgttagcacgggctcacacagatttaacactaattgatgtaatgggattattgtgttgcagctgagaagattggattgacatcaatccggccattttatggacaaaatggatctctggaggaggttcttggtggcctcaacgtgggttcaacacaagctataatcatgaaccagggaagctacagccaccagtctcttaaccaacaacgacgccgaatttctgagactatccagctgttgcaactgcagctgaacgaggacactgctctccaatttacaaaatcctccgtcttttttctctccttcggcaaagaagattacattgagctattccttcataactcttccagttcgagtcgaatgttccagaacagttcccaatattttgctaccattttggtcaaccaaatggcaaatgctgcgaggtatctttataatgcaaatgccaggaaaatcatatgtttgagaattctgccttttgggatgcacacctcgtatggcctgggagttacacatcagctggagattatcatgcaagtggatgtgtcgaacatgtcaatgacttggtctttgaatacaatagattgctggatgaacaaatagggaagcttaatacggaattttctgatgctcagatggtgttctgtgatgtttacaatggaatgatggagattatcaacgaaccaagggtttatggtatgtttttcctcccttgataacttcaaattgaaaatttacctatgctgaatgttgattgtcatgaagcatttgaaatctctttggcctggcagaatctacaacagcaatctgttcctttatattgtaagaaatttacaagcactcatgtgaaacaactatatcaagtgttctttatacaggttctgaagacatgaagagtgcatgttgcagacttggtttgaatggtgccatgatagggtgcgtctccatggacatggcctgggatcaagcttcaactcatgtttggtgggatttgttcaaccctactcaagcagtcaacaaaatcctagctgatgcagcctggtctggccaaccgatacctgatctttgccgtcctatcaccatccatgggttggttaacatggaagtctagcatttcctgtggctaccttcaatccttcatgatatcaaatttacactacttaaaactctcaaatatacaagtttcataaacaaaagtttcagaacaatttggggtaagcatataattgaaaagccatatgccagtcccatgcagtacagaaagaggtaaagaaatagggtgctactgcactgtatcactgctaggtatgctttgaaaatcatttcttcattaaaatcgcacagcacaaaatgggttttggtgctgacagcatttgcttttgtcctctgaaatcgattaaaactatgcatttacaatattaaataagaacttgaaaaagataccaaatgtacaactttactgaagaaaatgtaaaatattattactaaaacacatggagggaacaaagtagcaaaccctaaatcacagatattgatccaaaatcctaactcactctccatggctgcgaaagttcgaactagtttttgtttacctacattctccatcccaacttcaaaacccaaaaaaccctacttaaactcgttcaccgtctcagcctccaaatccatctccgaccaaatgctccacgcggcagtgatcggtggcgtcccagcctgatcctcctcggcggagaccctatcatccggcgggtcgagaccttcctcttcgaacgcaaccgccgtccgtcgcgaagcggtgaggtggtgccatccctctctgcatgctcgaagagttcgacatccctcgccacatcatcgaccgccacgtgacacgcatgcacatcttctccccttccaacatcgccgtctactttggcaaaaccctaaaaccccacgagttcatcgccatgctctgccgcgaggtcctcaattccttcctccgctcccgcgagcacgtcgccggcgctatcgaggtttccggcctcgacctccccgcagcgccggacgaccctacaccgtccactacaccgccaactgctcctggcgccactccctatccgtcaacgtcgtgatcggcgccgatggctccaatagccgcatggccaaagccatcggcaccggcgactatgccgcgccatcatgttccaggagtatttttatatttttatcccttttaaatacaaatatttaaaactaattaattctaattaagatttgatttaacttttgattttaaatcataaactatataaaacaaagatgttttttttttttataaactatatttaaaaattatggtaatctttgttcatctcaattaatttttgaaatttaacatactattttaataaaaaggacgtgtcttgattcaaataatttatttatctcttcaatttactatttaataaaattgattagttattattaataacgataacatttattatttttatttatatataatataagtatgtattttttgcaaccattttttcttctttaagatcatatatgagtacaaaaaaataatgacaacatcatacatgagtacacaaaattaatgataacagtgaaataaatagattaaattggcaaactcatttctcaaagttaaagaaaatgtctgtcttttcaaacatttaaaagagtggaaatacttcaaattccaaacaaaattttattaatcattctaattaaaggttaacatgatctgtaaaaatttaattaacctcaacaaaagggatttagttaatataaagaaaattgaataggaaaaaaagaattatannnnnnnnnnnnnnnnnnnnnnnnnnnnnnnnnnnnnnnnnnnnnnnnnnnnnnnnnnnnnnnnnnnnnnnnnnnnnnnnnnnnnnnnnnnnnnnnnnnnnnnnnnnnnnnnnnnnnnnnnnnnnnnnnnnnnnnnnnnnnnnnnnnnnnnnnnnnnnnnnnnnnnnnnnnnnnnnnnnnnnnnnnnnnnnnnnnnnnnnnnnnnnnnnnnnnnnnnnnnnnnnnnnnnnnnnnnnnnnnnnnnnnnnnnnnnnnnnnnnnnnnnnnnnnnnnnnnnnnnnnnnnnnnnnnnnnnnnnnnnnnnnnnnnnnnnnnnnnnnnnnnnnnnnnnnnnnnnnnnnnnnnnnnnnnnnnnnnnnnnnnnnnnnnnnnnnnnnnnnnnnnnnnnnnnnnnnnnnnnnnnnnnnnnnnnnnnnnnnnnnnnnnnnnnnnnnnnnnnnnnnnnnnnnnnnnnnnnnnnnnnnnnnnnnnnnnnnnnnnnnnnnnnnnnnnnnnnnnnnnnnnnnnnnnnnnnnnnnnnnnnnnnnnnnnnnnnnnnnnnnnnnnnnnnnnnnnnnnnnnnnnnnnnnnnnnnnnnnnnnnnnnnnnnnnnnnnnnnnnnnnnnnnnnnnnnnnnnnnnnnnnnnnnnnnnnnnnnnnnnnnnnnnnnnnnnnnnnnnnnnnnnnnnnnnnnnnnnnnnnnnnnnnnnnnnnnnnnnnnnnnnnnnnnnnnnnnnnnnnnnnnnnnnnnnnnnnnnnnnnnnnnnnnnnnnnnnnnnnnnnnnnnnnnnnnnnnnnnnnnnnnnnnnnnnnnnnnnnnnnnnnnnnnnnnnnnnnnnnnnnnnnnnnnnnnnnnnnnnnnnnnnnnnnnnnnnnnnnnnnnnnnnnnnnnnnnnnnnnnnnnnnnnnnnnnnnnnnnnnnnnnnnnnnnnnnnnnnnnnnnnnnnnnnnnnnnnnnnnnnnnnnnnnnnnnnnnnnnnnnnnnnnnnnnnnnnnnnnnnnnnnnnnnnnnnnnnnnnnnnnnnnnnnnnnnnnnnnnnnnnnnnnnnnnnnnnnnnnnnnnnnnnnnnnnnnnnnnnnnnnnnnnnnnnnnnnnnnnnnnnnnnnnnnnnnnnnnnnnnnnnnnnnnnnnnnnnnnnnnnnnnnnnnnnnnnnnnnnnnnnnnnnnnnnnnnnnnnnnnnnnnnnnnnnnnnnnnnnnnnnnnnnnnnnnnnnnnnnnnnnnnnnnnnnnnnnnnnnnnnnnnnnnnnnnnnnnnnnnnnnnnnnnnnnnnnnnnnnnnnnnnnnnnnnnnnnnnnnnnnnnnnnnnnnnnnnnnnnnnnnnnnnnnnnnnnnnnnnnnnnnnnnnnnnnnnnnnnnnnnnnnnnnnnnnnnnnnnnnnnnnnnnnnnnnnnnnnnnnnnnnnnnnnnnnnnnnnnnnnnnnnnaaaatattcctccgtgagtatttgattgaattttaatcacaaaaaatatttatttattttaataaagtttcatttcttataacatttattcatgaaaatatttaatgaacaaattatttttgaaactaatttaatttaaaatagaattaaccataagaaaactaaaaacaaagtttatgtggaaaatgacttaatatatttttggaaataattcaatttcaaaggaaagatatcataatgcaaatatatatgaaattaaattttgaaataatttaatttaaaattaatcaaatattgaagtatcaattcaaataattaacattactatattttattttttccttccattccaatcacaatcaaaactaaatgacattttttaataacattttttactgttaaaacatttttagatgatgtttgaaacttaaaaatataaattaaatacaaaagaattctattgcaattaaaaattttcactcagttttttgttatccaagatcatgagtgcaaatcataaaaaaattaaatcaatttttttaaaaaaagatcaaaagaaaatatgtaagacatcatcaaaataaataaaaannnnnnnnnnnnnnnnnnnnnnnnnnnnnnnnnnnnnnnnnnnnnnnnnnnnnnnnnnnnnnnnnnnnnnnnnnnnnnnnnnnnnnnnnnnnnnnnnnnnnnnnnnnnnnnnnnnnnnnnnnnnnnnnnnnnnnnnnnnnnnnnnnnnnnnnnnnnnnnnnnnnnnnnnnnnnnnnnnnnnnnnnnnnnnnnnnnnnnnnnnnnnnnnnnnnnnnnnnnnnnnnnnnnnnnnnnnnnnnnnnnnnnnnnnnnnnnnnnnnnnnnnnnnnnnnnnnnnnnnnnnnnnnnnnnnnnnnnnnnnnnnnnnnnnnnnnnnnnnnnnnnnnnnnnnnnnnnnnnnnnnnnnnnnnnnnnnnnnnnnnnnnnnnnnnnnnnnnnnnnnnnnnnnnnnnnnnnnnnnnnnnnnnnnnnnnnnnnnnnnnnnnnnnnnnnnnnnnnnnnnnnnnnnnnnnnnnnnnnnnnnnnnnnnnnnnnnnnnnnnnnnnnnnnnnnnnnnnnnnnnnnnnnnnnnnnnnnnnnnnnnnnnnnnnnnnnnnnnnnnnnnnnnnnnnnnnnnnnnnnnnnnnnnnnnnnnnnnnnnnnnnnnnnnnnnnnnnnnnnnnnnnnnnnnnnnnnnnnnnnnnnnnnnnnnnnnnnnnnnnnnnnnnnnnnnnnnnnnnnnnnnnnnnnnnnnnnnnnnnnnnnnnnnnnnnnnnnnnnnnnnnnnnnnnnnnnnnnnnnnnnnnnnnnnnnnnnnnnnnnnnnnnnnnnnnnnnnnnnnnnnnnnnnnnnnnnnnnnnnnnnnnnnnnnnnnnnnnnnnnnnnnnnnnnnnnnnnnnnnnnnnnnnnnnnnnnnnnnnnnnnnnnnnnnnnnnnnnnnnnnnnnnnnnnnnnnnnnnnnnnnnnnnnnnnnnnnnnnnnnnnnnnnnnnnnnnnnnnnnnnnnnnnnnnnnnnnnnnnnnnnnnnnnnnnnnnnnnnnnnnnnnnnnnnnnnnnnnnnnnnnnnnnnnnnnnnnnnnnnnnnnnnnnnnnnnnnnnnnnnnnnnnnnnnnnnnnnnnnnnnnnnnnnnnnnnnnnnnnnnnnnnnnnnnnnnnnnnnnnnnnnnnnnnnnnnnnnnnnnnnnnnnnnnnnnnnnnnnnnnnnnnnnnnnnnnnnnnnnnnnnnnnnnnnnnnnnnnnnnnnnnnnnnnnnnnnnnnnnnnnnnnnnnnnnnnnnnnnnnnnnnnnnnnnnnnnnnnnnnnnnnnnnnnnnnnnnnnnnnnnnnnnnnnnnnnnnnnnnnnnnnnnnnnnnnnnnnnnnnnnnnnnnnnnnnnnnnnnnnnnnnnnnnnnnnnnnnnnnnnnnnnnnnnnnnnnnnnnnnnnnnnnnnnnnnnnnnnnnnnnnnnnnnnnnnnnnnnnnnnnnnnnnnnnnnnnnnnnnnnnnnnnnnnnnnnnnnnnnnnnnnnnnnnnnnnnnnnnnnnnnnnnnnnnnnnnnnnnnnnnnnnnnnnnnnnnnnnnnnnnnnnnnnnnnnnnnnnnnnnnnnnnnnnnnnnnnnnnnnnnnttttaacaaattttttgaaaaagaaaactagtgtgataaccaataaaattttgaagaaataaatttaaatatttctctttgtaaaagtaaaaaaaaaaaagaagacaattttagtaaccttttaattatttgttatagttatgtttaataatcaatttacaactcttagtgtaattaatctgtttttgtattataattcgagttcttttattaaatgagagtgtttttaggcatggttatttttgagtaaatgattcaaatcctaagattatggagaaaattatgaaattgtgaatccatggaataaacatattctcttcaagactaaataaaattatcatattttttaggaaaaagggtttggtttcaggaacacaatcacatgaatacgaatacaacaacaatgactgttttagaccaacaacctccattgactcactctcgttaaacaacctttacgaggagtgcattgaggaagttgtccctccaatgttcaaagcaaaaacaattaaagaatgaattttgggtttcactaatgcgataacaaagggacgaatgcagctacaacgatgaaggcagatcaatcacctttatgaaaataacaaaatcactttccctatggactatggtgtgaaggagaaggggtgattttgtgcagtagccacaataattgggtcttcttttttcctattccctaatttcattcttttttatttgatttaaaaaatttcttctggtttttactttttattttgttaaaattgtttaataataaaataatatttttttaatccatgtcatggttatttgatggggatcacccactatagagtgatttgcttaacattttccttaaccaaaaacactataaatgaagtaaaaaaatataacatctagaggaaactataattaattttaacattgttacaataatcaattagtagcaaaattataaatatttaaactttttaatggttggcaatataaaaaaatatctaaataacagaaaattattctgataatgatttagaaatatattattatattaatatcaactgagtaaaattaaacaaaagtgaaaatatttcttaattgaataaaaataaaataatagatataataaatgatttgataaaaagagaaaaaataaataaaggtaaaaataatgagataaaggaaaaattatgtgcgcctttataatggtagacatgatatgatatgaaacacaggcgaaggaataaaaagcaaagaaagagttgaagcgtaggctataaatagaagtttgtgaattgaattggttctatccaaaaatcctgtctagttttgttgttgagttgaaacgatgaatatgaataacaatgttcggtggcttctactcccatactttatcttccttcttcttctttttcttccttcttcttcttcttcttcttcatctttctgcaaccaccatgacagctctgccttgctacaactcaaatactcattggctctcaacactacacatgattattattggtggcttgatgattattcctctttttcttcaaagacagaatcttggaacaacggaacagattgttgtgagtgggatggggtcacgtgcgacatcatctcaggccacgtgattggtcttgaccttagcttcagtaatcttgaaggtcaactccatcccaacagcaccatcttcagcctaagacaccttcaacgactcaacctagcctttaatcagttttctggctcttcaatatattctgaatttggtgatctggtgaatctcatgcatctaaatttgtcatactctggattcactgctcacattccctccacaatctctcacttgtccaaattactgtcacttgatctcggtagttatagaactgctgaagatccgagaatgagaattgatccatacacatggaagaagctcattcaaaacgcaaccaatttaagagagcttaatttagatggcgtggacatgtcttgtatcggagagagctctttgtcattgctaaccaatctctcttcctctttgatctcccttagtcttgcagccaccaaattgcaagggaatctatccagtgacatcctctctttacccaatcttcaaaaactatatttgtttaataatgaagacctcggaggtgaacttccaaagtcaaactggagtactccactaagagacttggatctctctcatactgctttctcgggaaacatccccggttccattggccatttgaagtctcttggcacactagatctggggggttgcaattttgatggactgcttccctcatcactgtttaatctaactcaactctccactttaagtttaagcgcgaataaattagagggaccaattccaagccaaatcaataaacttcaaaaattgcagttgctatttttgtcttataacaagttaaatggaacaattccgcgttggtgttattctctgccttccttgttagtgttgggtcttagagacaaccacctcacggggtcaattggtgaattctcatcttattctttggaatacttgtcactctctaataacaaactgcaaggtaatttaagtggtcatctggactttaattatttttcaaagttaaaaaatctaaattggctcggtctttctaacaatagttttctctctattaactttgatagtaccgctgactacatcttacccgaccttgaacgcttacatttatcttcctgtaatattaatagtttccctaaattcttagcaccacttcaaaatctgctcgcactagatctttctcataacaacattcgtggaagcattccccagtggtttcatgagaagctcttgcactcctggaataacattagtcatattgatctcagtttcaacaagttgcaaggagatctcccaattccacccaattatattcaatactttttagcctcaaataatgagctgaccgggaacattccttcagcaatgtgcaatgcaagctccctctatatactcaacttggctcataacaacttgacaggccagattcctcaatgccttggaacatttccttctctttcggcattggatttgcaaaagaacaacctttacggcagcatacctgggaatttttctaagggaaatgcattggagactataaagttgaatggcaaccaattggatggaccattaccacggtctttggcccactgcacaaagctggaagttttggacctggcagacaataacatagaggatacatttccccattggctagaaagcctccagcagttacaggtactcagtttgcgatcaaataagtttcatggtgtcatcacttgtttcggtgccgagcatccatttcccaggctgagaatttttgatgtctcaaataacaattttagtgggcccttaccagcatcatacatcaagaactttcaaggaatgatgagtgtgaatgacagccaaactggtttgaaatatgtgggtaacgacaattactataatgattcagtagtggttgtaatgaaaggtcgatccgtggagctcgagaggatattaactattttcacaatcatggatttatcaaaaaatatgtttgaaggagaaattccaaaagtacttggagaattgcattctctcaaagggcttaacctttcgcacaatgcaatcactggtaccataccacaatcctttggtaatttaagaaatttggaatggttggacctctcgtggaaccagttgaaaggagagattcctgtggctttgatcaatttgaattttctggctgtgttgaacctttcacaaaaccagtttgagggtatgatacctacaggtggacagtttaacacatttggaaatgattcctatgctggaaatccaatgctatgtggattccctttgtcaaaatcctgcaaagaggatgaagaaaggccaccacattcaacatttcaccatgaagaatcaggatttggctggaaagctgtagcagcgggatatgcatgtgggttgctatttggaatgcttttgggatataatgttttcatgactgggaaaccacgatggctcgcgagacttgttgaaggtgtgcttaattaattaagagtgaaaaggacaaatcataggggaaggaaatagtttactctaagtttattatggttattttgtgtgtttctttatgttttctgtaattttaacttctgtctgtggaagaaatatcgtctctggtgagtgatctatttcaagttgtttccaaataagaaaaaaatgtgatgaatgctttggttccaatttcaagcaattaattttccgtaaattggcattatattaggaacatatatatataattctctggaagaattttggctaacacaattaaatgtacaattgtatcattgtattttcagatatagttagttcatgatgaatgctgttcagcatcaaagctactgagaaaagaactagaaaaccaacctttcggtagttttagaattcactgccgatgaaggttctgtgggtcgtgtctttttctttactaacagcactacagaaaagtccattagtttaagatcggtatgtttttgcttagtgaaaggactttatgccaatactccaaccagaaagagtaggattttcttatttgcaaaaacacaaggctatccttgaaacaaatatttaatagtaaacgatggagaatttgcatacaagtggcttcagttaaaaccttctttcaactctctgttctacaaacagatattgaagttgacataattgatcctgatacagcctctggaaagactgatccatatgcattacaaaatttctagacaaaggcaccagagggtaagcatgttcttgaaattaagggttgaggtaacattagaatcagataatgtacctcaattgttttttaaaattaaaataaataaataaacataatatcagagacaaatgttagtgatcagaggatgagagggatacatatcacaggcataggccaagtaatggaacaaatctcaagaggttgcacattgattgataaaaatacagagaaggtatacggtgctctttttatactatctattaagcgactaacaagtaattaaccataataaattaagtgattaactaactctaagtgaattttactagtctcctaataacacacgtgggagacgataatcttttcattcctagcgagaagatatcaaaatgagtgatcatcccatattattggctcaaagactttgatgcttatctccaaagataaaaactcattagccacctcttgaatacagacatataccgtgtcacaaatgccatagtacgagctatgactaaaagtggacttttaaattaaaaattggtttcacctacccctgttattacctactttctgaaaacaacaatccctaaccaactcagtccaattattgatatttgaaaatattatagatgatgttttgtaaagaaaattaataaatactatatttaaatctgcagttagaaagactatcagtttacgaggatttcttttaggaaatttttacaagtctttgacgaggtcaagacttaaatttgaaataggaaaatgataagataaatgagaaaggtaattacaaaaaagtagtagaaattaatttgataatagatttaattagaactaatttaggaataaaatcattctagaactgaaatagtgactaatttttttttaagagattgatttgataacttatgtttttttttttaaaaaaaaactaatgcaatctactatgtaatatgagagaatgtcacatgacatttccatattcatttcctccaaaataataaatttaataataaatacaattgatatcatttttattatttattcattaatagtagttatcttttaaatagttacctttattacaatatatttttttcaggcaaattaaaaaaatatttttcaattaaatttttgcacgtactatttaattttaattttttttatataagttttattttatatatattttagttcgacaatagtatgacaaattatggtatccatgataacgattgttataaaataattatacaaaattatttaataacattttttactatactaaaatgtaaaccttgcaattaaaaattataaaagattgtattattgatgaannnnnnnnnnacttaatatatttttggaaataattcaatttcaaaggaaagatatcataatgcaaatatatatgaaattaaattttaaaataatttaatttaaaatcaatcaaattatgaagtatcaattcaaataattaacattaatatattttattttctccttcccttccaaacaaaatgaaatgacattttttaataacattttttatactgtaaaaacatttttttgatgatgtttgaaacttaaaaagataaattaaataaaaaagaattctattgtaattaaaaaatttcactcaatttttattatccgaaatcaagcatgtaaatcattaaaaaaattaaatcattttaaaaaaaaaagataaaaagaagacatgtaagatatcattatagtaaacaaagatttaatctaaaataatgctccaaataataacattttttgaaacatgtatgtatataaaaatatatttaaatatttcttaaattttttactaacatatatatttattaaaatttaaactaaaaaaattaataatatattaaatcttggttgtggtggtgaaagaacaggttaaatttctactccccaaaaaaatatactaaaaaaatatacaaataattgttgaaaaaaataactttgccaataattttgaagtaattccatcctagctctataaaagtatatatcaaataaaaaaatgaatgtaagagaaaaaaaatatcatctatatacttaaaataaataaataaattataactaattaaaataaagtattttcaaatttaactaaaaaggtaacacttgtggaataaatcacattttttttatatataaatatttcttaacgataatcatatatcactaattaaattaatttatgatgtattgaattaaaagatatatatagaatcagtttggatgtaacattcacaagtgtagtatttggactgcaatcataaagtgaaccaagataaaactactattttgtgctctcttttttttttcttgcaatattcattattattcaggaagaagggaaataaatcagtcagaccttatgcttacaaggcacccagatatttgggagttccctgaattaccaaacaaaatgtgtcacaatgaaaatattataggtttataacctttaggcgatgtggaatctaacggctcctcgcgccactccctattcgtcaacgtcgtgatcggggccgacggctagccgcgtcggcgactacgccgcgccatcgcgttccaggagtcttttttatatttttatcccttttaaatacaaatatttaaaactaattaattctaattaaaatttgatttaaattttgattttaaatcataaactatataaaacaaagatttttatttttataaactatatttaaaaattattgtaatctttgttcatctcaattaatttttgaaatttgacatactattttaataaaaatgacttgtcttgattcaagtaatttatttatccctttaatttattatttaataaaattgattatttattaataataatgataacatttattatttttatttatatataatataagtatgtatattttgcaaccattttttcttctttaggatcatacatgagtacacaaagttaatgataacaatgaaataagtagattagattgacaaactcatatcccaaagttaaagaaaatgtttgtcttcaaacatttaaaaagtggaaatacttcaaattccaaacaaaattttattaatcattctaatgaaaggttaacataatcagtaaaaatctaatcaatctcaacaaaagggatttagttaatataaagaaaattgaagaggaaaaaaagaattatacagatacttaaagagacatgatttactacttattacatccagattcaaactcacactaattaatttgataaccaccatagaactgcatttagcatgatcacaaagttctcattcattatccttgaactggtgtgaaatatattgttatttatcttaaaaagttttttaacatcttgatgaagggaagtctcgacaatactacccatattatttattgtttattttaggaatattattttgctcacggtgtagaaggcaatctaaaaagttagtcaagcataatagttatcatttataattctttatagggagtttctagtgtctttaactcaaaagcaaaactcaaaattaaagttgccaaatataatacttgtcatttctttaggatttttttacacgtcaaacgtctttgtcgaggtcaagacttaaatttgaaataggaaaatgacaaggtaaatgaacaaagcaataaaaaaaagtagcagaaattaatttgatgatagatttaattaaaactatgatagatttaattaaaactaatttaggcataaaatcattggagaaaagtgaataagaaattttttaagagattgatttgacaagtattttttttaaaaaaactaatacaatctactgtataatatggaaggatatcacgtgacgcttctatatttatttcttccaaaataataaatttaatgataaatgtaatcattaataattgttatcttttaaatagttaccttaattataatatatttctttcaggcgaattaataaaaaatatttgcaattagttttttacattaacttttatatgaatttaattttaactttttatataatttttatgttatgtatattttagtttcataataatacgtcaaattatggtatccatggtaacaattgttataaaataattctacaaaattatttaataacattttttacnnnnnnnnnnnnnnnnnnnnnnnnnnnnnnnnnnnnnnnnnnnnnnnnnnnnnnnnnnnnnnnnnnnnnnnnnnnnnnnnnnnnnnnnnnnnnnnnnnnnnnnnnnnnnnnnnnnnnnnnnnnnnnnnnnnnnnnnnnnnnnnnnnnnnnnnnnnnnnnnnaataatattttttaccatactaaaatttagactttgcaaatgaaaattatacaagattgtatgattgatgaaaaaatattcctccgtgaatatttgattgaattttaatcacaaaaaatatttatttattttaataaagtttcatttcttataacatttattcatgaaaatatttaatgaacaaattatttttgaaactaatttaatttaaaatagaattaaccataagaaaactaaaagcaaagtttatgtggaaaatgacttaatatatttttggaaataattcaatttcaaaggaaagatatcataatgcaattatgccaatatatatgaaattaaattttgaaataatttaatttaaaattaatcaaattgtgaagtatcaattcaaataattaacattactatattttattttttccttccattccaatcacaatcaaaactaaatgacatatttaataaatttttttactgttaaaacatttttagatgatgtttgaaacttaaaaatataaattaaatacaaaacaattctattgcaattaaaaattttcactcagttttttgttatccaagatcatgagtgcaaatcataaaaatattaaatcaattttttaaaaaaaagatcaaaagaaaatatgtaagacatcatcaaaataaataaaaatattatctaaaataatgcttcagataataataattttggaaatacatgtatataaaaatatataaaaatatttcttaaaatatttactaacatatatttattaaaatttaaactaaataattaataatatattaaatcttggttgttgtggtgaaagagcaggttaagtttctactccccaacacacacgaaggaacaaacgctaaaaggaaaaacgcggggccataatttacgcggttagattgtcaattgttatcattattcatgatttaatgttcttctaactttagaatttaagttgtatattttatcactataaaaagctctttactttatcactatagcgtcttggtcttggatgtgatattgagtgctcatcgctttttaactttctttttagctagttccgtttcaaagttgagagagattttaaaagtaccataaatctctcaaaacaacaaattcttctttattagttttgattaagctaatattttctcttattcaaaaataatttttgaacactcgatcaaaacgttagttaacacatgacatctactaagaaagagattatatatatatatatatatataagtgatataatatgatatgatagtaagaaaatagagaaaaaataatgagtgttacttttgtgtttacaaaaataaaatnnnnnnnnnnnnnnnnnnnnnnnnnnnnnnnnnnnnnnnnnnnnnnnnnnttctattaaagaattatcaaacatgttacttgtcattaaaaaatacgaactagagaaataacaaaataaatgaaaaaagtagttacataaaaaattgaggaattaacttgatactagactaaacttttttgtttttgcggacgatagactaaacttttaaagtcataaaataattggagaactaagatggtgacgaagaaatcttaagagataacttttaacaaattttttgaaaaagaaaactagtgtgataaccaataaaattttgaagaaataaatttaaatatttctctttgtaaaagtaaaaaaaagaagacaattttagtaaccttttaattatttgttatagttatgtttaataatcaatttacaactcttagtgtaattaatctgtttttgtattataattcgagttcttttattaaatgagagtgtttttaagcatggttatttttgagtaaatgattcaaatcctaagattatggagaaaattatgaaattgtgaatccatggaattaacatattctcttcaagactaaataaaattatcatattttttaggaaaaagggtttggtttcaccaacacaatcacatgaataagaatacaacaataataactgttttagaccaacaacctccattgactcactctcgttaaacaacctttacgaggagtgcattgaggaagttgtccctccaatgttcaaagcaaaaacaatattaaagaatgaattttgggtttcactaatgcgataacaaagggacgaatgcagctacaacgatgaaggcagatcaatcacctttatgaaaataacaaaatcactttccctagggtgtgaaggagaaggggtgattttgtgcagtagccacaataattgggtcttcttttttcctattccctaatttcattcttttttatttgatttaaaaaatttcttctggttttttactttttattttgttaaaattgtttaataataaaataatatttttttaatccatgtcatggttatttgatggggatcacccactgtagagtgatttgcttaacattttccttaaccaaaaacactataaatgaagtaaaaaatataacatctagaggaaactataattaattttaacattgttacaataatcaattagtagcaaaattataaatatttaaacgttttaatggttggcaatataaaaaaatatctaaataacagaaaattattttgataatgatttagaaatatattattatattaatatcaactgagtaaaattaaacattcattaaatattaaaaaagtgaaaatatttcttaattgaataaaaataaaataatttgataaaaagagaaaaaataaataaaggtaaaaataatgagataaagtaaaaattaagtgcagctttataaatattattttcatgaatttcttacaaaactcatttgtgcgctttaaaaattaaaaattaaaagcgcctttataaagctagacatgatacgaaacgcagcagaaggaaagaaaaagcaaagaaagagttgaagcgtaggctataaatagaagtttgtgaattgaattgagtgtatccaaaaatcctgtctagttttgttgttgttttgaaaggatgaatatgaataagaatgtttggtggcttctactcccatacttttgcttccttcttcttcttcttcttcttccttgttcttcttcctctttctgcaaccaccatgacacctctgccttgctacaactcaaatacgcactcaacacaccttccaaaacagcatcttggtacaacgacacagattgttgtgagtgggatggggtcacgtgcgacatcatctcaggccacgtgattggtcttgacctgagcagcagtaatgttcaaggtcaactccttcccaacagcaccatcttcagcctaagacaccttcaacgactcaacctagcctttaattatatttttggtgacattccctccacaatctctcacttgtccaaattactgtcacttgatctaggtaacttcaacttgatagatgatgatgatcccaactacccgagaatgagaattgatccatacacttggaagaaactcattcaaaacgcaaccaatttaatagagcttaatttagatggcgtggacatgtcttgtatgggagagagctctttgtcattgctaaccaatctctcttcctctttgatctcccttagtcttcaagacaccaaattgcaagggaatctatccagtgacatcctctctttacccaatcttcaatacctatatttggatcataataaagacctcggaggtgaacttccaaagtctaactggagtactccactaaggtacttggatctctcttatactgctttctcgggaaacattcccgattccattggccattttaagtctcttaacacactatctctgtccgattgcaattttgatggactgcttgcctcatcattgtttattctaactcaactcgtctatttagatttaagcaataataaattagagggaccaattccaaccgaaatcaataaactttcaaaattatggattctatatttgtatgataacaagttaaatggaacaattccacgttggtgttattctttgttagagttggatcttagcgacaaccacctcacggggtcaattggtgaattctcatcttattctttggaatacttgtcactctaataacaaactgcatggtaatttaagtggtcatctggactttaatcatttttcaaagttaaaaaatctaaattacctcgatctttctaataatagttttctctctattaactttgatagtaccgctgacaacatcttacccaaccttgaacacttatatttatcttcctgtaatattaatagtttccctaaattcttaccaccacttcaatatctggcccgactagatctttctcataacaacattcgtggaagcattccccagtggtttcacttctggaataacattagttatattgatctcagtttcaacaagttgcaaggagatctcccaattacacccaatggaattgaaaactttttagtctcaaataatgagctgaccgggaacattccttcagcaatgtgcaatgcaagctccctctatatactcaacttggctcataacaacttgacaggccagattcctcaatgccttggaacatttccttctcttttggcattggatttgcaaaagaacaacctttacggcagcatacctgggaatttttctaagggaaatgcattggagactataaagttgaatggcaaccaattggatggaccattaccacggtctttggcccactgcacaaatctggaagttttggacctggcagacaataacatagaggatacatttccccattggctagaaagcctccagcagttacaggtactcagtttgcgatcaaataagtttcatggtgtcatcacttgtttcggtgccaagcatccatttcccaggctgagaatttttgatgtctcaaataacaattttagtgggcccttgccagcatcatacatcaagaactttcaaggaatggtgagtgtgaatgacagccaaactggtttgaaatatatgggtaacgacaattactataatgattcagtagtggttgtaatgaaaggtcgatccgtggagctcgggaggatattaactattttcacaaccatggatttatcaaaaaatatgtttgaaggagaaattccgaaagtacttggagaattgcattctctcaaagggcttaacctttcgcacaatgcaataactggtaccataccacaatcctttggtaatttaagaaatttggaatggttggacctctcgtggaaccagttgaaaggagagcttcctgtggctttgatcaatttgaattttctggctgtgttgaacctttcacaaaaccagtttgagggtatgatacctacaggtggacagtttaacacatttggaaatgattcctatgctggaaatccaatgctatgtggattccctttgtcaaaatcctgcaataaggatgaagattggccaccacattcaacatttcaccatgaagaatcaggatttggctggaaagctgtagcagtgggatatgcatgtgggtttctatttggaatgcttttgggatataatgttttcatgactgggaaaccacaatggctagcgagacttattgaagttgtgcttaattaattaagagtgaaaaggacaaatcataggggaaggatatggtttttttgtatgtgtctgtatgttttctgtaattttaacttctgtctgtggaagaaatatcgtctctggtgagtgatctatttcaagttgtttccaaataagaaaaaaaatgtgatgaatgctttggttccaatttcaagcaattaattttccgtaaattggcattatattaggaacatatatatacagttctctggaagaattttggctaacacaattaaatgtacaattgtatcattgtattttcagatatagttagttcatgatgaatgctgttcagcatcaaagctactgagagagaagtagaaaaccaacctttcggtagttttagaattcactgccgatgaaggttctgtgggtcttgtgtctttttctttactaacagcactacagaaaagttcattagtttaagatcggtatgtatttgcttagtgaaaggactttatgccaaaactccaaccagaaagagtaggattttcttatttgcaaaaacaaaaggctatccttgaaacaaagtatttaatagtaaacgatggagaatttgcatacaagtggcttgagttaaaaccttctttcaactctctgttctacaaacagatattgaagttgacataattgatcctgatacagcctctggaaagactgatccatatgcattacaaaatttctagacaaaggcaccagagggtaagcatgttcttgaaattaagggttgaggtaacattagaatcagataatgtacctcaattgttttttaaaattaaaataaataaataaacacaatatcagagaaaaatgttagtgatcagaggatgagagggatacatatcacaggcataggccaagtaatggaacaaatctcaagaggttgcacattgattgattaaaatacagagaaggtatatggtgctcttatttatactatctattaagagattaacatgtaattaaccataatgaattaagtgattaactaactctaagtgaattttactactctcctaataacacacgtgggagacgataatcttttcattcctagcgagaagatatcaaaatgagtgatcatcccatattattggctcaaagactttgatgcttatctccaaagataaaaactcattagccacctcttgaatacagacatataccaaagtcaccataacaatgtgttaggaaaaactccacctcacacaacaaaattacccactcaccctagggatcttagatgatttttttttttcttctcttggatctatatatagagttaaataacaatacaatattcaaatattatcatcatcctaaacttaaaaaaatcctaaaataattaaatctagataaaatcttcaacatttgaaatataacaaatttctaaaaaaatctcctttaattttctcctgctccatttattttgaaatttaaattgttcttcaacaattcctccctcaattaaaatttctaaataactttttttttttaaaatttctccaacttttctgtcctcacaacaccaaatgtctctccttgtagcttacatcccgaatttaaaccaacatacttatatccttgtcatgtcatctctcacaataaaattagaaggtacaactctctcacattttgaaaggtttctcctagccatataacatgctttctccaaacaactatccctatcaaactcagaccaattcgatcttgattaattttgctgcatggttgatatgaaatccaactcaccaagactcccaccatcatcataaggctcccaccatcatacctttcaccaccaactcacctccataattcaagttttcttttctttatttaattgtaccactttctttatttaattctagaattactactataaataggagtatcatcaagcattgtaacacacaacaattcatttgaatacaagaacaacaagttcttctcttttctctcttttctctctagtccttttagttcctgagccatatttggcatcagagcaaggttccagagtcaagggaaagcctgaattcgagccagaggttcactttcgagttttccggcaaatttcaattctgccaaacatcgaaagtcccatctctgatcgtttttttgggaaaactgacatcgccaccgccggaagtccacgcgccaaagtgaggaggtatcgggttcgtaagaaaattcttagtatgctctgtggttgcagtttgtctgatcttccacatcagaaaagaattattcttgttgctggaaataaagtgtggtagtgtgaaaagtgcatgtctagaaagttctggctaaggaaagacttggtatttaagtgtgtccatttgtgacccacctctctttcctgggaacttacctggtgtactattttacagactacgatcactgttccagtttgtctctcacggtactatctacggaatccacgcgacgccatgcgccaccgccggaagtgccacatcacctgccacgtcagccactcatccaatcaaaaactgtcacgtgtcagtcaacgccacgtcagccaatcaggtgctgccacgtgtcctgatcgtgtaagttttcaaaatttgcagaaaagcccctataaatttcagaatttaattttcagtccctacacttcattaaaattaccatttaacccctgcacttcctaaaattaccaatttatccctacaccccataaaattaccattttgacccctactaaaattactattttacccttactctaaaaaaaaaaatatcattttaccctcatacctataaatttaccaatttatcctcatactttctaaaacccatataatggcccctagacgcagaccagttcacgaaaccataattgaagaattgaggcaacaaattgaacagttgcaagcaactgtaaatgctcaacaaatacaactagaggagcaaagagcatcccaaagctacgattctgaaaatagtgattccgcatcgaccagcaatcgtcgaacgcaaaggcaagccttccgatcagacgatattagagtggaaatcccagaatttgaagggaagctacagcccgatgattttgtagactggctacaaaccgtagagcggatattcgagtataaagatatacccgaagacaaaaaggtcaaaattatcgctctcaagttgaaaaagcatgcttccatctggtgggaaaacttaaagaagaagcgagcaagggaaggaaaaagcaaaatccggatcatgggaaaaaatgcgaaaggaattgaatcgtaagtttttacccattcattttgtccaagataattttattcaactacaaaatcttcgccaaaagaacatgtctgtagaagaatacactagggagtttgagcaattaatgatgaagtgcgacattcaagagagagagaagcaaaccattgcccgctaccttggaggtttaaatgctgatattgctcaacaagtccaacttcagcaatatgaaaccgtagatgacgctattcgactatccatccgaatcgaaaagcatcagcccagaaggtcttcatatcaacctttctcctctttcccctacaggaatactgcaaatactcgcagaccacaaacccaacaacctagcacaacaaatagccaacaaccagtccgaaaccctcgtgcgtccaacaaccaacaacccaacacctccaacaacaaccccccaaaatccaatacagaggtcaactcgagagtgaccaaatgtttccgatgccaaggatttggacacattgcttctaattgtccaaaccgtagagtcattaccatcattgacggagaagcccatgaagtttctgaaaaagatgaggaaccaatctttgatgaagaacccatctttgatgaggaacccgtatatgatgaagaaaccacccctgctgatcaaggcgaactactggtggttagacgtagtctgcatacaacggcagttaaagaagatccgtggctaaggcacaacatcttccacacccgctgcactacgcaaggtaaaatttgtgacgttatcattgatagtggaaattgtgaaaacgttatatccacttacatggtggagaagttgaaactgccaacacaagaacatcctcactgtaacgccctgaaatttcggtaaattcaaaatagatgcttaatgtgattgttttgttaattgtttgataagtttgtatgagttgaatgatggttgttctattgcttggtgtagataagttatgtggagatgggtgatatttacgtaattaaacggatttacgtaaacggatatacgaaagggcagtttggtcattacaagaggtatgggtgtagttagtaagagctgggtgtcgttagcaattactgtagcatcacggatttactgtagcttcacggacgattactgtagcaggtgaagttagtaattgctgggtgcagttagtaattactgtaactgtagcttcacggaccgggttactgtagcaggtgaagttagtaattgctgggtgcagttagtaattactgtaactgtagcttcacggacagggttactgtagcaggtgaagttagtaattgctgggtgcagttagtaattactgtaactgtagcttcacggacgattactgtagcaggtgaagttagtaattgctgggtgcagttagtaattactgtaactgtagcttcacggaccgggttactgtagcgtactgtagcttcacggaccagggttactgtagcatactgtagcttcacggaccgggttactgtagcatcacggaccgggttacagttactgtagcagttactgtagcagtctataaatatgcggaagctgcggaaaattttgcagaaactatggttcctcctactatactacagccagtttcacaaaatcttagatcttgaaggggaattaagtaattcacggacgttgaagcccagagaagtgattctctagctctccacgattgtcttgagagctcttggttaggtaaggggagtttattatttagttatagttttgataccatagttgggggccagggagtccaactatgaaagataactgcctgtccctgctgtgtgctggttttcaagaaaaactgtttttaactaatgggatgcgataaattggttggttgatggataaactgtgaatgatattattactgtgatgattgaatttttgggaaaagtcctaattacagaggagactctgcccaaaattttataatatgttttcctatttaattctttattaaatttttaaatgggcagaaaagtggattttctatattgcattcctcctctttaatttagaattttcctaaaataccagtctcgtagtaatgtggattatgaatgaatgaagtgatattgatgtcattgataatgttgaaatgattattgatgtgtttgatgatgtatatatgatatgtatgatgttgatgtgaatagtgtcattgtatgtggatatacatggatacccatggggggtgtatgacgggttacccttgcgaggaaggatttgttcctagccaggtcatacattgattgtgcccatggttgtaggctgtgtatgtacacgtgggatgccatgaccggttggttacccttgcgaggatggatttgttcctagccacggtcagtgcatcggtgagcccacattggtctgttatgtatgtacatggggggtgcatggcgggttacccttgcgaggaaggatttgttcctagccgggtcatgcattgatgatgcccatgtttcatacttcatttggatgtgtggaaatagaatgaaggcactcgcgtacctgtgagtttcagtgggctgagaacgcaggtactaaggggtcatcaggtttggaattcccttgctacgctggctgatcactgggtgggggaatggccagtgcacgacagggtggccctaataggcggtgaatcatttgtcctgtgagaggctatttccggtgatggtaccacattgcatgctgatagatgagtcaggtgcatgcatcattctttgcataattgtttgagttgtgaaatgcatgggatgattgatttgttgagggtgtattggaattatggatttcttttgttaatgattgtggcgagtaatgttggtttttcctaattgctgctatctgatattgtttggtttttatatgataaactcacccttgcatttgttgtaccgtgtggttggtacctgtgatgatcacgaacttttgttcgtgggagcagatgatcagcagtagatgactttggagggagatcttctttttggttggagccgccaagccgacgtgatgacgttggatttctttttggagaaagagttgtgttttgttaaccaactctttcttaattaatctttggctgtttgttggtatgtaattttgggtgtatatacacgtaaattaaaggaagttatgacatgtggatgacatgtactaatttaatatatatgtataatgtgtttaaatatgtaattgtaatatgtgtatgataattgtattatcgcgaaaaatttaccatcgttttcataaataaattaatgaagttttattaaaaattgaagttgtacgattaagagttagtgatatcgtagcgacgaggcgggtcgttacactcacccctacaaattacagtggcttaataaaggaaatgaggtgaaagtttctagacgatgtcttgtgaatttttccattgggcagaaataccaagatgaaacttggtgtgacgtaatccctatggatgcttgccacctcttactaggaagaccatggcagtatgaccgtcgtgctctattcaacggttataccaacacttactccttcatcaaaaatggagtaagaatcaagttaacacctctatccccaagtgaactaaacaaggggaagaaggaatcaaagcctctcgaggttctcatttccaggaagcaacccaaattgtccacagaagaagctcataacacgagccttatcctcgtgtgtgaagccaacaaggaaacagttcttccgcaggagattaaggaaatactcgctgattttaaggatgttgtacctgatgagattccttatgggttacctccagagcgagagatccagcatgctattgacttcatccctggagctgtcattccaaataaaccggcgtacaggatgagtcccaaagaacacgatgagattcaacgccaggttgaggagttgcttaaaaaaggattgattcgagaaagtgttagtccttgtgcggtaccagtcctcttagtaccgaaaaaggatggtagttggagaatgtgtgttgatagccgagctgtcaacaaaattaccatcaagtatcggtttcctataccgcgacttgatgatttgttcgaccaactgcatggagctaccctgttttccaaaattgatcttcgtagtggctatcatcaaattagaattcgtccaggagacgaatggaaaactgcattcaaaagcagagatggtctctacgagtatacagtaatgccttttggtttatccaatgctcccagtactttcatgcgcctgatgaaccaggtacttagaccttttattggtaaattcgtagttgtttactttgacgacattttggtctatagcaaaagaaaggaagatcatttggaacacattcgtcaagtcctacaaacactacgagagcaaaaactctatgtcaatatgaagaagtgcgcctttcttactaatgaagtaaacttcctgggatatgtaatcaccgctgaaggcgtacgagtggataccagcaaaatcgaagccatcaacagttggcctattccaaagtctgttcatgatgtaagaagttttcatggcttagcttctttttacagaagatttatcaagaattttagctccattgcttcccctctgacggattgcatcaagggagataaattccaatggacagaacaggcccagaaaagctttgaaatgctaaagaaacgtcttaccgaagcaccactactagcccttccaaactttgaccaagtgttcgaggtcagctgtgacgcttccaatgcaggaatcggtgctgttttgagccaagaaggtcatcctatagcctttttcagtgagaagctcaccaatggtcggctcaagtattccacctacgacaaggagttttatgctgtagttcgtgccttacaacactggagccactatctgttgaataaagaatttattctttattcagaccatgaagctctcaagcacttgaattcccaacagaagattaatcgaatgcatgctgcctggagtgaattcttgcagccatacccattcctactgaagcacaaggcaggagttcaaaatgttgtagccgatgctctcagcaggcgacatgcattactctccactctccaagcaaaggtcatcggatttgaggctatcaaggaattataccaagatgatcctgactttagcaaaatttggaatgtgacagaatcacaacccttccaaaagtactaccagcatgaagggtttctgttcaaagataaaaccctgtgcatccctcaatgctcattacgggaagcaatcatctgggaagcccatgacggaaatctagctggtcactttgggcgagacaaaaccgtaggcttggtaaaagagaaattctattggccaagactagagaaggatgtcaacaagcacattcaaaggtgcaagatgtgtcacatagccaaagccaagagtcagaacacgggactgtatatgcctcttccagttccattagcaccttgggaagacgtcagcatggattttatccttggccttcctagaacacagcggcagaaggactccataatggtggttgtagacagattttctaagatggcccactttgttccgtgtcagaaaaccaatgatgctgttcaagttgcagaattgtacttcaaggaaattgtccgccttcatggtgttccaaaaaccattacttccgaccgagatgttaaatttctgagtcatttctggagaaccctttggaagaagatgggtactaaactacaattcagtagtgctagtcatccccaaacagatggacaaaccgaggcaatcaacagagtattgggaaatcttcttcgaagtttcattgggaagaatttaaagcagtgggatcttcttcttgcacaggtcgagtttgcctacaataattctgccaatcaagctacgggaaaatgtccattcgaagtagtttatggaactcgtccgctcagtccattggatttagccgtctcgcctgacactcaatactacagtgcagaagctgaagaaagagcaaaggaaatcaagaaattacatgagcacgttcgtgatcagatccagaagcagaactctaagtacaaggctcaacgagataagcatcgaaagttacaaactttcaaggaaggagacttagtctggatccaattacgaaaagaacgatttccaaatcagccaaatgccaaattatctccaagagcggatggcccgtttcgggttgttcaaaagatcaacgataacgcttacaagattgagctacccggttcttacggagtgtcaactacatttaatgttgccgatctctcaccatacttcaaggaagaagaattcttagactcgaggacgagtcttttccaacctggggagaatgatatggaatccaactcaccaagactcccaccatcatcataaggctcccaccatcatacctttcaccaccaactcacctccataattcaagttttcttttctttatttaattgtaccactttctttatttaattctagaattactactataaataggagtatcatcaagcattgtaacacacaacaattcatttgaatacaagaacaacaagttcttctcttttctctcttttctctctagtccttttagttcctgagccaatggtgatcgtagatgcgcccaagccaatgtgtcaccataacatcaaagtcaccataacaatggcctggtaatgttctaaaggctgccacgtttcatattttaaagttgaaaagatattgatagatatttggaccaaaaaaagaaacaatattgatcatactaatatgcacacagcagacgactgaattgatcttgaaattaaaaacatagtccttcttctgaaatttatataccctagcaatgtcgtccaaatattgaaaacaattttataccctgatactatatatattcagattctattattcagttttttcaaaaaaaatattggaaacctattaaaaatttatatcaaaagataaaataaataaaaagcaatactaacaatatactcttgtttaacattttttatattatttgctaaatttgatgtgaattctattacaaaatttgatgatgggatttacgtaaaattcactcaatgattaaagatttgtcaaaaggactttctagcttttcacaactgccaaagagttttacagactccattttggcgtcttaaatccatttgttaaacgtaattttttcctttaaaaaatggttcacgtgaaacgtgagtcacactctctccactttaattaaacattctcatcatctagattctggatgtgaatttcacacattattactgtaaattaaaacatctcaatctgtcatttttctttatctgtatttttatgtttaaacatcttaatagtttgtctcttttcatctactatattttatcactattttaaaattgaatttcaatagttcttataaaaataaattatcaatagttaaaattaatattatatcataatttaaattattcattataaatttaaaatataatttatatattaaaaaattgctgaaacactttttattagctgaattttaaaattatttatttatgatggattttaatgctataagaataaatttaatatgattctttcgtgtgtgatgcgacttgttttctgcaattttaacttttgtcttttgtggaagaaatctcacctgagtgatctatttcaagttgtttgcaaataagaagaaaaaaaatgtgatgaatgcttttgttttaatttcaagtaactcattttccgtaaattatctagggtaacctgcataagcatcaagcaaaatttgcacattgaaccttcaatcggcacacagttggcattatattaggaacatatgtactgtttgctggaagaatttaggctaacacaattagatgttttcagatgtaattagttcatgatgaatgttgttcaggcatcaaagctactgagaaaagtagaaaaagaaaattgaaaatgaaagtaacataagaataaaaataattaaatttttatacaaggtacttagctccttaaggttactttctagctagcatcattccaaagtcttccttttattttggctgcatcttatttctctgcttcatactcttgtgggttgctatttggaatgctcttgggctgtgatgtattattttttaaaatccaatccatgaacacccgtaaccttcatgatgtcaaatttacactacctaaaactctcaaatatacaagtttcataaacaaaagtttcagaacatttaggggtagcaaataattgtaaagccatatgctagctaggcctatgcagtaattttttttataaaagaaatagggtgctacggcactgcaacactgttgggtatgctttggaaatcatttctttattagaacattaaactatgcatttacaatattaaataataacttgaaaaaaaaatacccaatatatatacaactttactaaagaaaatgtaattattaatatattattactaaatcacatggaaggaacaaagtagaaaaccctaaatcacagatattgatccaaaatcctaactctctccatggctgcgaaaattcaaactagtttttgtttacctacattctccattccaacctcaaaagcctgcttaaactcgttcaccatctcagcctccaaatccatctctggccgaaagctccgggcgacaatgattgatggtggcctcgctggatcctccgcagcagaggccctagcctccgacggcgtccagacctttctcttcgaacgcaacccagcgtccgtcatgaagccgtgcggcgcgccatccctctctgcatgctcgaagagtttgacattcctcaccacctcatcgaccgccacgtgacgttcatgcacatcttctccccttccaacatcatcgtcgacttctgcaaaaccctaaaaccccacaagttcatcgccatgctctgctgcgaggtcctcaatcgactccttcctccgctcccgcgcacatgctgcagagggttttctacgtagtaacgtgtccaggaaggctttggtggaactgtgtggggatgagtatgttcaacgcatgatgtttgagaactatttgtataagaagttggcacgtgggagagtgttggatgatgctaagcttttcgtcaataccattgggagcttggtgagatctaaagtattggaaacaccaagcatggagagtttgatactatgacttcggaaatcccactaagtgcatgtagcttctgcgtcatttttacgtggttttgctgcttgaacgttgatccaaaacgtgtttccaaacatgttctaaataatttgtttgtgtaatttctgtgtactgtattattatgtaaccttctaacggaggcacttttgaatttgatgggatggtggattgatcaccaattcaccaacacttctttaagaattgttttattcaaatacaaaagaacagtatacaaaatttcatttgttgatgtcataattcaagggcttaagtaaagcaacaataaacttatacaagaatgagcttatctatccgtctaatcacacatcgaagacactgtccttcaaccgataaatcaaaggctttgttgatatccttgaactccacctcgtgtgtgacaaacccatccaaattcagttcctgttgataattgcagatgaaatttagtaccaaacaaatgcatcctgaaaactttgttttatggcattattattttacttagtcatcactatgttaatagaagggatcaagagcatagactgaaaaaaattaaaagaaattgcacaaagtaccttgtccaggtagcgtttaaggagaataggtacgtcagacttgggtttgagtcctccaaataagcaccccacgaggctcttcccactatggaggacctcattacaactaaggctcaacgtggatcctggcttgtccactcctaaaactattgtttttccccaaccctgtagggaaagcatcagttttaacaacattcaacaagtttgcatctgataattaagagtttattattaaaatttccaatcaaacctgtctcaatttgacaggaaacttcattttcatcaagtaccatgaatttcaaattagttagcacaaaagaaaacctattactagtgctacttttagtgctaggttgatcctttaaaattattctgcagttattcattcaatcacattactctgtcggcctataaaccatcttgcaaggcatgtttaggggcactttgagagagagatagatagatagacaaatagatagatagagggagagggatagagagagagagagaggagagagacctttttgcaagaagcatatgcttcttgcaccaatgatgccattccaacacattcaaagcaataatcagctccccgccagtcatctctatgataacctgctaaacaagcacatatgagaatgaaatttcaagacttaaggcaactaaattaaataaagatcggagcctagaagagggtagacctggctcacagatttgagcacaataatgacacaaaacaaatttgtataagcattatcattaagcagataatgcattaccagtttcatatttttctgggttgaaatccacacctataatcctagttgctccacaaagtctagctccctcggcaacctaggaaaccagtcacttgctatgagcgtttgagtataataaaccacaaaacacacacaaaaaaagctatgtggattccttactgctaatccaatacttcccaacccaaaaatggctactgtagaccctggctccacacctgctgttctccaagcagcacctacccctaaaagtgcaagtttaatcaaaatactgaattagatgaacgttgttgagtagtgaattaaaatgtgaatacaaccatgtgtttatttatgataagatattctgactataatttttattatgcaactgatatagttcttcaatattctttttgtttaatgtttacaattttgcatggtttaggcaaattacatgttgatacaccacaactaagtaggcctgccctgttgggtggtattgctggatcaatcctggttagatgagcaatgtcaaccacggtatactcactaaaactagacgcaaacaagaaatggggtatgatatctccttttaaatccgtgaatctagaggtggcatgtctaggcatccaaggagacacctcgaaaggaaacttcgaacaaaggttgctcttgcttgatttgcaatctatacaatccccacaatcaggtaagaaaattggaacaaccacatatccttttgtgacttcggttacatcctctcctacgctttccacaaccctggatcatatcaaaattagctagaacatcatcatcagcttctataatataatatgcagaagatataatggggctcaaggtggcaaatcgttggcaaccaacacaaaaataggtagcaaagataaatataattagtcgtagaatttgttcttaaatcaatgtatcgattactgttgttaaatcatctgaaggtttgcagacacactttgctttgtaatttaatccttgatcaaaattgaaacattaaaatttggctcataactatccaatcttttctctaggattgaatttagaaaattaacaactcctgatagttagaccacaaagatgcctctaaacaattttagcatgtgtaacacagaatacctttttttttattattattttgaaaggaaaaagtaatgtattgaataaaagaacaaaggtttgagcacaaactggtcaaaaccaagccattacatgaataaaagatatagcaatagagcccaaaaagacaagccccctaacttaatacaactgatgtatgtagaaaccacatctgtaaggactagggagtaagaaccacataaaatttgaccaaacatttatatattaaaccacaaaagtttactctacctacctaaaaagtaaagcgcaaaagtttatgttgatacagaaagatacaatacaaatagggtattaataaacagtggatttctttttccttaggattgaataatattatccagtaaataaaattataaaactaaaaagagtgaaaggcatacactcactcacccaacagcctcatcccaagattcttgtacaaattgcaggagggacctttaatatagaaaccactataaatatcaagtgaatagtataacatgtttttaatctcgtggatgtgtgtaacaaaccaccaatcattttatgaaagaaatcgaaggacgaaataagaaattggcttcagttttttgttttgcacagagtagtgtttatatatgataggcgtatcatatttaccaaaatgtcaccaggttacacactagttttgagagtgcttatgcactcttcatgaaagaagtgctggtgtttatcaataagagaaatcattaaagcttattaccctaagtcagattagattcgaattattagtatttgaaaatattatagatgatgttgtgtaaagaaaattaataaatactatataaaaatctgcagccatcaaatacaaactcgactgtgtgcagttagaaagacgaacagtttaagaggggatattgaccatgtaactggaggcttctttacaaaggagttcaaaacgcctcttcttatttttcatttttttaaagtactatgggtgattcttttttgtttgtttttacctccgtaaatgaaaaataagtacgaaaacataaattttgcttatgaaggttgttgagaaacggggaaggtgtgacaggtttttcgaaaagaaaaaaggaaaaaaaaagttagacaattagtccaatgacaacacaacaggttatgaaagaagttgttttccttcctctatgatcaaatgggaaatacataaaaagttgtgtgtaattattgttacaccagaaacaccgatcaatattacatagtaacttacatttttaaactgagataatcaaatgcaaatctttggcttcttaccactttggatcaaacaagttccttatccctacttaaatggtttagctgtaacaccaacgttatagcatcaaatcagttcggtcaaagcaattcgagtggacaaaacaaaaggaaaaagtaggcaaactatatgaggaggtttattgtttgttcattctgctcctgcagttctgctaatggtcattctctgcatagttcatggacagtcgacagacacaccaattaccaatgctaatgtgacgaatagctcacatgtatcagcattgtatgtgttaggggattcctctgttgattgtggagacaacactctgttctaccctctgcttcatggtcgtctctctttgtatccatgtaacggctccaatgccacccttcttcctcaactacttggtacttttctttatgtttttcttcatcatttggactctgcattcgtgattcaagcaaattggacagaaccactgaaatctcacatgcaggatgcaggaagttataatttggaaccattgcattcgtgtcaggataaaataaatcttctttcagtgattcttataagtcctatcatggtgaatgaaagcatatttcctttcatttttttctgcataatgtgatctgaattaatgtattgcgatagctgcccatttattcgagcaatttattccataatcatgatctatagtgtcgtttaagtgacatcaagcacacacatgcatcatctctttctgtaagttcttcactggtaaattagaggggtaccaaaattatctgttatttctgccgaaacttttcaatattgacttacgatgagcataactaatgttagcacaggctcacacagatttaacactaattgatgtagtgggatcattgtgttgcagctgagaagattggattgacatcaatccggccattttatggacaaaatggatctctggaggaggttcttggtggcctcaactttggttcaacacaagctacaatcatgaaccagggaagctacagccaccagtctcttaaccaacaactacgccaagttgctgagactatgcagctgttgcaactgcagctgaatgaggacactgctctccaatttacaaaatcctccatcttttatctctccttcggcaaagaagattacattgagctattccttcattactcttccagttcgagtcgaatgttccagaacagttcccaatattttgctaccattttggtcaaccagatggcaaatgctgcgaggtatctctataatgcaaatgccaggaatatcatatgtttgggaattctgccttttgggatgcacacctcgtatggcctgggagttacacatcagctggagattataatgcaagtggatgtgtcgaacatgtcaatgacttggtctttgaatacaatagattgctggatgaacaaataggcaagcttaatacggaattttcggatgctcagatggtgttctgtgatgtttacaatggaatgatggagattatcaacgaaccaagggtttatcgtatgttttccctcccttgataacttcaaattgaaaatttacctatgctgaatgttgattgtcatgaagcatttgaaatctctttcgcctggcagaatctacaacaccaatctgttcctttatattgtaagaaatttacaggcactcatgtgaaacaactatatcaagtgttctttatacaggttttgaagacatgaagagtgcatgttgcagacttggtttgaatggtgccatgatagggtgtgtctccatggacatggcctgtgatcaagcttcaactcatgtttggtgggatttgttcaaccctactcaagcagtcaacaaaatcctagctgatgcagcctggtctggccaaccgatacctgatctttgccgtcctatcaccatccatgagttggttaacatggaagtctagcatttcctgtggctaccttcaatccttcatgatatcaaatttacactacttaaaactctcaaatatacaagtttcataaacaaaagtttcagaacaatttggggtaagcaaataattgaaaagccatatgccagtcccatgcagtacagaaagaggtaagaagtagggtgctactgcactggatcactgctaggtatgctttgaaaatcatttcttcattaaaatcgcacagcacaaaatgggttttggtgctgacagcatttgcttttgtcctctgaaatcgattaaaactatgcatttacaatattatataagaacttgaaaaagataccaaatgtacaactttactgaagaaaatgtaaaatattattactaaaacacatggagggaacaaagtagcaaaccctaaatcacagatattgatccaaaatcctaactcactctccatggctgtgaaaattcgaactagtttttgcttacctacattctccatcccaacctcaaaacccaaaaaaccctacttaaactcgttcactgtctcagcctccaaatccatctccgaccgaaagctccgggcggcagtgattggcagtgtccccgtcggatcctccttggtcgagaccctagcatccggcggcgtcgagatcttcctcttcgaacgcaaccgccgtccgttgcaaagcggtgaggcggcgccatccctctctgcatgcccgaagagttcgacatccctcaccacatcattgaccgccatgtgacgcgcatgcacatcttctccccttccgacatcgctgtctacttcggcaaaaccctaaaaccccacgagttcatcgccatgctccgccgcaaggtcctcaattccttcctccgctcccgcagcatgtcgccggcgctaccgaggtctccggcctcgacctccccgcagcgctggacgaccctacaccgtccactacaccgccaacggctcctggcgccactccctatccgtcgacgtcgtgatcggcgccgacggctccaatagccgcgtggccaaagccatcggcaccggcgactatgccgcgccatcgcgttctaggagtatttttatatttttatcccttttaaatataaatatttaaaactaattaattctaattaagatttgatttaacttttgatcttaaatcataaactatataaaacaaagatgtttttttttttttataaactatatttaaaaattattgtaatctttgttcatctcaattaatttttgaaatttaacatactattttaataaaaaggacgtgtcttgattcaaataatttatttatctcttcaatttattatttaataaaattgattagttattattaataatgataacatttattatttttatttatatataatataagtatgtattttttgcaaccattttttcttctttaagatcatatatgagtaaaaaaaataatgataacatcatacatgagtacacaaaattaatgataacagtgaaataagtagattagattggcaaactcatatcccaaagtnnnnnnnnnnnnnnnnnnnnnnnnnnnnnnnnnnnnnnnnnnnnnnnnnnnnnnnnnnnnnnnnnnnnnnnnnnnnnnnnnnnnnnnnnnnnnnnnnnnnnnnnnnnnnnnnnnnnnnnnnnnnnnnnnnnnnnnnnnnnnnnnnnnnnnnnnnnnnnnnnnnnnnnnnnnnnnnnnnnnnnnnnnnnnnnnnnnnnnnnnnnnnnnnnnnnnnnnnnnnnnnnnnnnnnnnnnnnnnnnnnnnnnnnnnnnnnnnnnnnnnnnnnnnnnnnnnnnnnnnnnnnnnnnnnnnnnnnnnnnnnnnnnnnnnnnnnnnnnnnnnnnnnnnnnnnnnnnnnnnnnnnnnnnnnnnnnnnnnnnnnnnnnnnnnnnnnnnnnnnnnnnnnnnnnnnnnnnnnnnnnnnnnnnnnnnnnnnnnnnnnnnnnnnnnnnnnnnnnnnnnnnnnnnnnnnnnnnnnnnnnnnnnnnnnnnnnnnnnnnnnnnnnnnnnnnnnnnnnnnnnnnnnnnnnnnnnnnnnnnnnnnnnnnnnnnnnnnnnnnnnnnnnnnnnnnnnnnnnnnnnnnnnnnnnnnnnnnnnnnnnnnnnnnnnnnnnnnnnnnnnnnnnnnnnnnnnnnnnnnnnnnnnnnnnnnnnnnnnnnnnnnnnnnnnnnnnnnnnnnnnnnnnnnnnnnnnnnnnnnnnnnnnnnnnnnnnnnnnnnnnnnnnnnnnnnnnnnnnnnnnnnnnnnnnnnnnnnnnnnnnnnnnnnnnnnnnnnnnnnnnnnnnnnnnnnnnnnnnnnnnnnnnnnnnnnnnnnnnnnnnnnnnnnnnnnnnnnnnnnnnnnnnnnnnnnnnnnnnnnnnnnnnnnnnnnnnnnnnnnnnnnnnnnnnnnnnnnnnnnnnnnnnnnnnnnnnnnnnnnnnnnnnnnnnnnnnnnnnnnnnnnnnnnnnnnnnnnnnnnnnnnnnnnnnnnnnnnnnnnnnnnnnnnnnnnnnnnnnnnnnnnnnnnnnnnnnnnnnnnnnnnnnnnnnnnnnnnnnnnnnnnnnnnnnnnnnnnnnnnnnnnnnnnnnnnnnnnnnnnnnnnnnnnnnnnnnnnnnnnnnnnnnnnnnnnnnnnnnnnnnnnnnnnnnnnnnnnnnnnnnnnnnnnnnnnnnnnnnnnnnnnnnnnnnnnnnnnnnnnnnnnnnnnnnnnnnnnnnnnnnnnnnnnnnnnnnnnnnnnnnnnnnnnnnnnnnnnnnnnnnnnnnnnnnnnnnnnnnnnnnnnnnnnnnnnnnnnnnnnnnnnnnnnnnnnnnnnnnnnnnnnnnnnnnnnnnnnnnnnnnnnnnnnnnnnnnnnnnnnnnnnnnnnnnnnnnnnnnnnnnnnnnnnnnnnnnnnnnnnnnnnnnnnnnnnnnnnnnnnnnnnnnnnnnnnnnnnnnnnnnnnnnnnnnnnnnnnnnnnnnnnnnnnnnnnnnnnnnnnnnnnnnnnnnnnnnnnnnnnnnnnnnnnnnnnnnnnnnnnnnnnnnnnnnnnnnnnnnnnnnnnnnnnnnnnnnnnnnnnnnnnnnnnnnnnnnnnnnnnnnnnnnnnnnnnnnnnnnnnnnnnnnnnnnnnnnnnnnnnnnnnnnnnnnnnnnnntttttactacactaaaatttagaccttgcaaaagaaatttaatcaggaatttattattgatgaaaatatatccctccgatccatgaatatttggttgaaatttaatcatgaaaaaattatttattttaataaagtttcatttgttattattcacgaaaatatttaagaattgttctaaaataattatataaaattatttaataatattttttatcatactaaaatttagactttgcaaatgaaaattatacaagattgtatgattgatgaaaatatatccctccgatccatgaatattttcttgaaatttaatcatgaaaaaattatatattttaataaagtttcatttcttatgaaattcattaacgaaaatatttaagaattgttataaaataattatataaaattatttaataatattttttatcatactaaaatttagactttgcaaatgaaaattannnnnnnnnnnnnnnnnnnnnnnnnnnnnnnnnnnnnnnnnnnnnnnnnnnnnnnnnnnnnnnnnnnnnnnnnnnnnnnnnnnnnnnnnnnnnnnnnnnnnnnnnnnnnnnnnnnnnnnnnnnnnnnnnnnnnnnnnnnnnnnnnnnnnnnnnnnnnnnnnnnnnnnnnnnnnnnnnnnnnnnnnnnnnnnnnnnnnnnnnnnnnnnnnnnnnnnnnnnnnnnnnnnnnnnnnnnnnnnnnnnnnnnnnnnnnnnnnnnnnnnnnnnnnnnnnnnnnnnnnnnnnnnnnnnnnnnnnnnnnnnnnnnnnnnnnnnnnnnnnnnnnnnnnnnnnnnnnnnnnnnnnnnnnnnnnnnnnnnnnnnnnnnnnnnnnnnnnnnnnnnnnnnnnnnnnnnnnnnnnnnnnnnnnnnnnnnnnnnnnnnnnnnnnnnnnnnnnnnnnnnnnnnnnnnnnnnnnnnnnnnnnnnnnnnnnnnnnnnnnnnnnnnnnnnnnnnnnnnnnnnnnnnnnnnnnnnnnnnnnnnnnnnnnnnnnnnnnnnnnnnnnnnnnnnnnnnnnnnnnnnnnnnnnnnnnnnnnnnnnnnnnnnnnnnnnnnnnnnnnnnnnnnnnnnnnnnnnnnnnnnnnnnnnnnnnnnnnnnnnnnnnnnnnnnnnnnnnnnnnnnnnnnnnnnnnnnnnnnnnnnnnnnnnnnnnnnnnnnnnnnnnnnnnnnnnnnnnnnnnnnnnnnnnnnnnnnnnnnnnnnnnnnnnnnnnnnnnnnnnnnnnnnnnnnnnnnnnnnnnnnnnnnnnnnnnnnnnnnnnnnnnnnnnnnnnnnnnnnnnnnnnnnnnnnnnnnnnnnnnnnnnnnnnnnnnnnnnnnnnnnnnnnnnnnnnnnnnnnnnnnnnnnnnnnnnnnnnnnnnnnnnnnnnnnnnnnnnnnnnnnnnnnnnnnnnnnnnnnnnnnnnnnnnnnnnnnnnnnnnnnnnnnnnnnnnnnnnnnnnnnnnnnnnnnnnnnnnnnnnnnnnnnnnnnnnnnnnnnnnnnnnnnnnnnnnnnnnnnnnnnnnnnnnnnnnnnnnnnnnnnnnnnnnnnnnnnnnnnnnnnnnnnnnnnnnnnnnnnnnnnnnnnnnnnnnnnnnnnnnnnnnnnnnnnnnnnnnnnnnnnnnnnnnnnnnnnnnnnnnnnnnnnnnnnnnnnnnnnnnnnnnnnnnnnnnnnnnnnnnnnnnnnnnnnnnnnnnnnnnnnnnnnnnnnnnnnnnnnnnnnnnnnnnnnnnnnnnnnnnnnnnnnnnnnnnnnnnnnnnnnnnnnnnnnnnnnnnnnnnnnnnnnnnnnnnnnnnnnnnnnnnnnnnnnnnnnnnnnnnnnnnnnnnnnnnnnnnnnnnnnnnnnnnnnnnnnnnnnnnnnnnnnnnnnnnnnnnnnnnnnnnnnnnnnnnnnnnnnnnnnnnnnnnnnnnnnnnnnnnnnnnnnnnnnnnnnnnnnnnnnnnnnnnnnnnnnnnnnnnagtagacaattttagtaaccttttaattatttgttatagttatgtttaataatcaatttacaacaactcttgtggtaattaatatgtttttgtattataattcgaattcttctattaaataatagtgtttttagatatggttatttttgagtaaatgattcaaatcccaagattatgaagaaaattatgaaattgtgaatccatggaataaacatattctcttaaagactaaataaaattatcatattttaaagaaaaaggatttgatttcaccaatatagtcacatgaatacgaatgcagcaataatgactgcttcacaccaacaacctccattgatgcactcattctcgttaaacaaccttcacgatgaggaagttgtccctccaattttcaaagcaaaaatgattgaagaatgaattttgggtttcattaatgcaataacaaagggaaaaatacaactacaatgatgaccacatatcaatcacctttgatgaaagtaacaaaatcaccttcattagggtgtgcaggagaagaggtgattttgtgcaggagccacaataattggatcttcttattccttttccctaatttcattcttttttatttgatttaaaaaatttcttctaatttttactttttattttgttaaaattgtttaataataaaataagattttttttaatccatgtcatgtgtgtttgatggggatcacccactgtagagtgacttgcttaacattttccttaaccaaaaacactataaataaagtaaaaaatataacatttagaggaaactataattaactttaacattgttacaagaatcaattagtagcaaaattagaaatatttaaactttttaatggttggcaatataaaaaattatctaaataacataaaattattttgataatgatttacaaatatattattatatcacaggcgaaggaagaaaaagcaaagaaagagttaaatcgaaatgaaaggctttgaagcagcgtaggctataaatagaagttcgtgaattgaaatggttgcatccaaaatactctctagttttgttgttgagttgaaaggatgaatatgaataagaatgtttggtgggttctactcccatactttctcttccttcttcttcttccttcttcttcttcctctttctgcaaccatgatgacagctctgccttgctacaactcaaatactcactcaacatttcagaattttggaacaacggaacagattgttgtgagtggcttggggtcgagtgcgacatcatctcaggccacgtgattggtcttgacctatcctataatcatttttttggtgacattccctccacaatctctcacttgtccaaattactgtcacttgatctcgccagctactacaatataagtgatggtcccaaccgcccgagaatgagaattgatccatacacatggaagaagctcattcaaaacgcaactaatttaagagagcttaatttagatggcgtggacatgtcttgtatcggagagagctctttgtcattgctaaccaatctctcttcctctttgatctcccttgatctccaagacaccaaattgcaagggaatctgtccagtgacatcctctgtttacccaatcttcaaggactatatttgagtgataataaagacctcggaggtgaacttccaaagtcaaactggagtactccactaagagacttggatctctctcatactgctttctcgggaaacatccccggttccattggccatttgaagtctcttcacacactagatctggggggttgcaattttgatggactgcttccctcatccgtctttaatctaactcaactcctcactttagatctatcatttaataaattagttggccccattccatattggtgttattctttgccttccttgtcattcttggatgttagcaacaaccacctcacggggtcaattgacttgagtggtcatctggactttcatcaattttcaatgttcaataatctagagcacctcgatttttctcacaatagttttctctctattcactttcatagtaccgctgattcaaagttcaaaaatctaaatcacctcgatctttctcacaatagttttctctctattattgttgatagtaccgctgactacatcttacccaaccttgaagtcttatatttatcttcctgtaatattaatactttccctaaattcttagcatcacttcaaaatctggtcgcactagatctttctcataacaacattcgtggaagcattcccccgtggtttcatgagaagctcttgcactcctggaatatacccaaccttgaattcttatatttatcttcctgtaatattaatactttccctaaattcttagcaccacttcaacatctgcgcgcactagatctttctcataacaacattcgtggaagcattcccccgtggtttcatgagaagttcttgcactcctggaatagcatgacggatattgacctcagtttcaacaagttgcaaggagatttcccaattccacccaatggcattcagagctttttagtctcaaataatgagctgactgggaacattccttcagcaatgtgcaatgcaagctccctctatgtactcaactgttagaaatttgggtatgataatcctggataacttcaaagaatcgtgttcgtacactttccgaacaaagtatttcgaccctattcttgcctgggttcacgaaatccttgttgggataattctttgaagaacaatctgcttctggcaatagagaacagatcaggaatgtagagagaaagtatgattttcgtatatctgaaatctgaggccaaatgactccttatataggagtttttccaaacaatgcaactctttgctactcgcaacctttccatcaaaggtagttatatgtgtatggttatgatgggaagttaacagcggttaacagcggttgagataagagtagttaactatagtaaatcacattactactaaaatccattgatgacactaaaatcaccaacaaatcccccccattttagtgtaatccttgatctactcagtataacgatcaaacaaatgcataaatgaaatgtcttgcgattgaatttcatcttagtacaaatacacattccatatactcaagaatcagggtatcgttacgattgaacccgtcaacctatttgaatatctgaagatattatacacatatgttttctacaacactctactattcatacttgacactttacaagccatgtgtccttatccattcgtaagcatataggaagccaaatccaaacttcttgaagcggcaaaacttcatgctcacataggtgatccttttaatcttgtacctgcatttacaatttttcaaaagaaccattaagaagatatacttcaacctaaccatcacttgcaggtctgagcaaataccttgggaagacaaacataattgctccaatttctaattataatctttccacattgaattctgcttctaacgttgtattagaagggaattgggtatatcataattagaatatttaaatggactttaatcccatccctattaccgacttctttactaagtctctagctaaccctttcgtcaagtgatcagctaagttttgttgcgaccgaacaaactcaatggatatcacccctttcatgattaattccctaatcatactatgtctaacacccaagtgtctagattttccattgtatatttgactataggctttagccaaggtggcagcactatcacaacggatagaaattggtgatatcggtttaggccatattggaatctcatataccaagtttcttagccattccacttccttaccagcagcagctaatgctacaaactcagattccattgtagaactagttatacatgtttgcttcttggaagcccatgaaatggcacctcccccaagcaaatacacccatccacttgtagaggacagaaccatcttccactggaacaaaagtcttgaaccagaaacgatccttgcaaacatgtgttgtggcgccagaatcaatccaccacgcgatagcatcatccttcgttttgggattggtccttagacccttttcccgaaccacttgcattcgcgttattgtgttttttcccataacggcaatccttcttgaagtgacctgttttaccacacttccaacattctagttttggtttcagtttggagccgaaatttcctttggcgttcttgaaagcacgcttctttcctttgtttatattgttattgttcttaccgccctcttcgatcatattaaccgagggtccagcaacttcttttccttttcccttgtcaccctccagcgcccttagagattcttctatgcgcaagtgacttccaagttgaaccagagacaagtcatcttttccatgcttcaaattgtgtttgaaatccttccatgaaggaggcaacttgtctatgatacttgagacagatattgtttcatccatcttcaatccatgttgtgtgaattgtccaaggattcggaggagttcattgaattgttccatgacagaccttgattcaaccatcttgtaattgttgaaatcagtcatcagaaactttttactggacgagtcctctgccatgtacttggattcgagacaatcccacaattcctttgcagattctacattttgataaatatcaaataagggatcagacataccgttaagaatgtgtcctctgcatatgtagtcgtcgttctcccactttgatctgcgccttatattttcaacggtatcttcctcaggaagttctgtaatcggagtagataagacgtacaccaccttcaatgttgtcaacatgaaatgcatcttcttctgccaacgcctgaagtcttgtccttgaaacttgtccaactttccgaaattagtagtcatgtccttgactgtgcttcctctaacgcttcctccatccatgattatcagaaaatactttgttcgtttgttagaaatttgggtatgataatcctggataacttcaaagaatcgtgttcgtacactttccgaacaaagtatttcgaccctattcttgcctgggttcacgaaatccttgttgggataattctttgaagaacaatctgcttctggcaatagagaacagatcaggaatgtagagagaaagtatgattttcgtatatctgaaatctgaggccaaatgactccttatataggagtttttccaaacaatgcaactctttgctgctcgcaacctttccatcaaaggtagttatatgtgtatggttatgatgggaagttaacaacggttaacagcggttgagataagagtagttaactatagtaaatcacattactactaaaatccattgatgacactaaaatcaccaacatcaacttggctcataacaacttgacaggccagattccgccatgcctgggaacattgccttctcttttcgcattggatttgcaaaagaacaacctttacggcaacatacctgggaacttttcttattacggaaataaattggagactataaagttgaatggcaaccaattggatggaccattaccacggtctttggcccactgcacatatctggaagttttggacctgacagacaataacatagaggatacatttccccattggctagaaagcctccagcagttacaggtactcagtttgcgatcaaataagtttcatggtgtcatcacttgtttcggtgccaagcatccatttcccagtttgagaatttttgatgtctcaaataacaattttagtgggcccttgccagcatcatacatcaagaactttcaaggaatggtgagtgtgaatgacaaccaaactggtttgacatatatgggtaacgccaatttctataatgattcagtagtggttgtaatgaaaggtcaatttgtggagctcaagaggatattaactattttcacaaccattgatttatcaaataatatatttgaaggagaacttccgaaagtcattggagaattgcattctctcatagggcttaacctttcgcacaatgcaatcactggtaccattccacgatcctttggtaatttaagaaatttggaatggttggacctctcgtggaaccagttgaaaggagagattcctgtggctttgatcaatttgaattttctggctgtgttgaacctttcacaaaaccagtttgagggtatgatacctacaggtggacagtttaacacatttggaaatgattcctatgctggaaatccaatgctatgtggaatccctttgtcaaaatcctgcaataagaatgaagattggccaccacattcaacatttcaccatgaagaatcaggatttggctggaaagctgtagcagtgggatatgcatgtgggttgctatttggaatgcttttgggatataatgttttcatgactgggaaaccacaatggctcgcgagacttgttgaaggtgtgcttaattaattaagagtgaaaaggacaaatcataggggaaggaaatagtttactcttagtttattatggatggttcttttgtgtgtctgtatgttttctgtaattttaacttctgtctgtggaagaaatatcgtctctggtgagtgagctatttcacgttgttccaaataagaaaaaaaaaatgtgatgaatgctttggtttcaatttcaagcaattaattttccgtaaattgacattatattaggaacatatatatacagttctctggaagaattttggctaacacaattaaatgtacaattgtatcattgtattttcagatatagttagttcatgatgaatgctgttcagcatcaaagctactgtgaaaagaagtagaaaaccaacctttcggtagttttagaattcactgccgatgaaggttctgtgggtcttctgtctttttctttactaacagcactacagaaaagtccattagtttaagttcggtatgtttttgcttagtgaaaggactttatgccaaaactccaaccagaaagagtaggattttcttatttgcaaaaacacaaggctatccttgaaacaaagtatttaatagtaaacgatggagaatttgcatacaagtggcttgagttaaaaccttctttcaactctctgttctacaaacagatattgaagttgacatgatcctgatacagcctctggaaagactgatccatatgcattacaaaatttctagacaaaggcaccagagggtaagcatgttcttgaaattaagggttgaggtaacattagaatcagataatgtacctcaattgttttttaaaattaaaataaataaataaacataatatcagagacaaatgttagtgataagaggatgagagggatacatatcacaggcataggccaagtaatggaacaaatctcaagaggttgcacattgattgattaaaatacagagaaggtatatggtgctcttatttatactatctattaagcgattaacatgtaattaaccataatgaattaagtgattaactaactcttaagtgaattttactactctcctaataacacacgtgggagacgataatcttttcatacctagcgagaagatatcaaaatgagtgatcatcccatattattggctcaaagactttgatggttatctccaaaagataaaaacttattagccacctcttgaatacagacatataccgtgtcacaaatgccatagtacgagctatgactaaaagtggacttttaaattaaaaattggtttcacctacccctgttattacatactttctgcaaacaacaatccctaaccaactcagtccaattattgattaattttgccgaatgatgatcgtagatgtgcccaggccactgtgtccctctgggaggttgcttaagcgaaaataaataaaccaaagtcaccataacaatgtgttaggaaaaactccacctcacacaacaaaattacccactcaccctagggatcttagatgattttttttttctcttggctctatatatagagttaaataacaatacaatattcaaatattattatcatcctaaacttaaaaaaattcctaaaataattaaatctagataaaatcttcaagatttgaaatataacaaatttctaaaaaaatctcctttaattttttcctgctccatttattttgaaatttaaattgttcttcaacaattcctccctcaattaaagtttctaaataactttttatttaaaatttctccaacttttctgtcctcacaacaccaaatgtctctccttgtagcttacatcccgaatttaaaccaacatacttatatccttgtcatgtcatctctcacaataaaattagaaggtacaactctctcacattttgaaaggtttctcctagccatattacatgctttctccaaacaactatccctatcaaactcagaccaattcttgattaattttgctgcatggtgatcgtagatgcgcccaagccaatgtgtcaccataacatcaaagtcaccataaccatggcctggtaatgttctaaaggctgccacgtttcatattttaaagttgaaaagatattgatagatatttggaacaaaaaaagaaacaatattgatcatactaatatgctcacagcagacgactgaattgatcttgaaattaaaaacatagtccttcttctgcaatttatataccctagcaatgtccaaatattgaaaacaattttatattttataccctgattgttggaaatcgacaatcacacacacaaaacgtaaaacagaaaagagaatagggaagagagatatgacacagtaatttaccctggttcacccaatgtaggctacgtccagcttgtctgtactataatcacctcaccgccactcgttacaagtcactcggtttacaaggggaatataaataggattaaaagaaaccctaacagtagctattcatgggccctagcccaaactactaacaaaagtaaaaatattacaaataatcagaggcccacaacagttggctttctgctgaccccgccaacaagaagggttgtcatctgactgcgaaggatgagccatatccaacactgatactatatatattcagattctattattcagttttgcatttaaaaaaaaaaatattggaaacctattaaaaatttatatcaaaagataaaataaataaaaagcaatactaacaatatactcttgtttaacattttttctattatttgctaaatttgatgtgaattctattacaaaatttgagtgatgggatttacgtaaaattcactcaatgattaaagatttgtcaaaaggactttctagcatttcacaactgccaaaaagttttacagactccattttggcgtcttaaatccatttgttaaacgtaattttttcctttaaaaaatggttcacgtgaaacgtgagtcacactctctccactttaattaaacattctcatcatctagattctggatgtgaatttcacacattattactgtaaattaaaacatctcaatctgtcatttttctttatctgtatttttatgtttaaacatcttaatagtttgtctcttttcatctactatattttatcattattttaaaattgaatttcaatagttcttataaaaataaattatcaatagttaaaactaatattatatcataatttaaattattcattataaatttaaaatataatttatatattaaaaaattgctgaaatactttttattaactgaattttcaaaattatttatttatgatggattttaatgatataagaataatttaatatgattctttcgtgtgcgatgcgacttgttttctgtaattttaacttttgtcttttgtggaagaaatctcacctgagtgatctatttcaagttgtttgcaaataagaagaaaaaaaatgtgatgaatgcttttgttttaatttcaagtaactaattttccgtaaattatctagggtaacctgcataagcatcaaggaaaatttgcacattgaaccttcaatcggcacacgtacagttggcgttatattaggaacatatgtactgtttgctggaagaatttaggctaacacaattaaatgtacaattgtatcattctattttcagatgtaattagttcatgatgaatgttgttcaggcatcaaagctactgagaaaagtagaaaaagaaaattgaaaatgaaagtaacataagaataaaaataattaaatttttatacaaggtacttagctccttaaggttactttctagctagcatcattccaaagtcttccttttcttttggctgcatcttatttctctgcttcagactcttgtgggttgctatttggaatgctctcgggctgtaatgtatcatttttcaaatttacactacctaaaactctcaaatatgcaggtttcataaacaaaagtttcagaacatttaggggtagcaaataattgtaaagccatatgctagctaggcctatgcatgcagtaatttttttataagagaaatagggtgctacggcactgcaacactgttgggtatgctttggaaatcatttctttattattagaacattaaactatgcatttacaatattaaataagaacttgaaaaaaaaatacccaatatatatacaactttactaaagaaaatgtaattattaatatattattactaagacacatggaaggaacaaagtagaaaaccctaaatcacagatattgatccaaaatcctaactctctccatggctgcgaaaattcaaactagtttttgtttacctacattctccattccaacctcaaaagcctgcttaaactcgttcaccatctcagcctccaaatccatctctggccgaaagctccgggcgacagtgattgatggtggcctcgctggatcctccgcagcagaggccctagcctccgacggcgtccagaccttcctcttcgaacgcaacccagcgtccgtcgtgaagccgtgcggcgcgccatccctctctgcatgctcgaagagtttgacattcctcaccacctcatcgaccgccacgtgacgttcatgcgcatcttctccccttccaacatcatcatcgacttctgcaaaaccctaaaaccccacaagttcatcgccatgctctgctgcgaggtcctcgatcgactccttcctccgctcccgcgcacatgctgcagagggttttctacgtagtaacgtgtccaggaaggctctggtggaactgtgtggggatgagtatgttcaacgcatgatgtttgagaactatttgtataagaagttggcacgtgggagagtgttggatgatgctaagcttttcgtcaataccattgggagcttggtgagatctaaaatgttggaaacaccaagcatggagagtttgatactatgactttggaaatcccactaagtgcatgtagcttctgcatcattttgacatggttttgctgcttgaacgttgatccaaaacgtctttccaaacatgttctaaataatttgtttctgtaatttctgtgtactgtattattatgtaaacttctaacagaggcacttttgaatttgatgcaatgatcgattgatcaccaattcaccaacacttactttaagaattgttttattcaaatacaaaagagcagtagtatacaatatttcattggttgatgtcataattcaagagcttaaataaagcaacaataaacttatacaagaatgagctcatcgatctgtacgtccaatcacacatcgaagacactgtccttcaatcaataaatcaaaagctttgttgatatccttgaactccacctcgtgtgtgacaaacccatccaaattcatgcagttcctgttgataattgcagatgaaatttagtaccaaacaaatgcatcctgaaaacttggaaattggtattatgtcagtgttatttaacataaaattggtattatgacaaacctccgctatagtttccagatgaaacagaacaactgctgctcatacatatgaaacatacaatgcaactaagaaagccattaaaaagtactgaaaaagataaaaaaaagctagaatagttatggcttacctttacatcatatgggttgtccttgagttgttgccaatttatgttccatggccttccaaaacacaagatgagtcaatgcaacgtgttagttatagtgtagagaggatttgggagctgatctatgaaatatactttgtgaaaacgacaaaccaagtacagacacttttgctccccctgaagctaaacaagctagaatattggtatcacttccttttttggtcactggtattctcaattctcatgtctcatctcagcctcacgcactgatcctttcccttttttggtattatttttatgagctgataaaaagatatttaaatgttactcattcagtcctgtaggtattaacacaacattttatgtttcagtcttatacctaagaattatttgttttagttattgcatgtatatgtttagtttttttttttaatctatgtcatctaaaataattctcactctcgtctcaaatatataaaaaaaatatatatatttttcttagtctcaaatataattttcttaaactaattttactttatttatattaatgttattatatctaaaatgtttttcacttaattgagattttaatttcaataactatttttaaattcctaacatcaagttctaaccaagaatacgttgaaaagaaaaattaatttttaattgagattggtgtaattaaatatagttgactaacttttttaataaatgtggatcaattttttttatatatttgagatcggagagagtatgggcaaaagaaaaatacaaattaaaaaattaatttgaaatctggggcagtttggaaacaaatttgaaaaatgagacactcaaacacgtccaatttatgtgtgtttaaacacatccaatttaggtgtgtttcacctaattgtgacacgtgtcattttgaggcgcagtgtccataaaacttcgaacagtcataacttttgactgtaatgtccgattgagacgaaaccggtgacaaaacgctcgaaattgagaggagaaggcaatgtccgattgaggcgaaaccggtggcaaaatgcttgaaattgagaggagaaagcctaggcaaattctcgaaggggattcggtcaactagtttttttcaaaaaacgcttctaagtgcttcaaaattaggatttaagattcaatcatccaaaaatttcctttttgtcttattttttaattatttaattagttaatttaatgttattttttatttttaattacttctctgaatttcgaacgttttgacatatcgtacgcctccatcgaatatttctatcaaaagttatgactatttgcaggacatatctacacctaatttgagctatgaccgtttgaataacatatcgtatacctaattttgactaatttttttgcaaacattaagatgtaaaaataaaaacatcaacttaaacaatcatgagtgaattaaaaattatatgcatatttaattatatacagtaatgaatttgaagagattaaattgaattttgactcaaatcttaaaaaaaaaaaattgaaccaaaatcaaaaactcaaaaagtgtatctagacacaaagacacaaattattttcatgaaaattaatgtttcgtaaaattaaaataaatatcatttttatggaattcaattaaaaatacaacaaagttaataaaaaaaattagtccaaattaagtaatttttttggtatatttatttaccaaaattatactgtaaatttttaaacgatttcagttaaaaaaattaaaaaatcataatattgtgatcgcaacacattttaaaaaaaatattttgtaaaaaagtattagtgactgaattagagactgaattagcgacggatttttaaaaaattccaatattatgtattaacggccgaattagcgacggaattagagacggatagagtcacgtccaaattgggtgtgtttgagtgctccatttctcaaatttgtttctaaaatgtcccagatttcaaattaaattattaatttgtattatttgttttttggcagagagtatgaacttataaaacattatgtgtaaagaataataaaagagttaaaaagtgaacgtgtaatgactaaaatgaacagtttttaggttcggagacacatcttgaatgtccagatatcttccacttctgagaggacattgaagaaattattttctcttatttgcaggaagccaatatgaagaatgttgaagacatagttgaaaacaaaatgccttgaactttctgtacaggttaatgtcataaagtgaaccaagataaaactactattttgtgttttttttttctggcaatattcattattattcaggaagaagggaaataaatcagtcagaccttatgcttacaaggcacccaaatatttgggagttccctgaattaccaaacaaaatgtgtcacaatgtaaatattataggtttataacctttaggcgtatgtggagtctaacggcccctcgcgccactccctattcttcaacgtcgtgatcggggccgacggctagccgcgtcagcgactacgccgcgccatcgcgttccaggagtctatttaaatttttatcccttttaaatacaaatatttaaaactaattaattttaatttaaatttgatttaaattttgattttaaatcataaactatataaaacaaagatgtttttttttataaactatatttaaaaattattgtaatctttgttcatctcaattaatttttgaaatttgacatactattttaataaaaatgacttttcttgattcaagtaatttattatttaataaaattgattatttattattaacaactataacatttattatttttatttatatataatacaagtatgtattttttcaaccattttttcttctttaggatcatacatgagtacacaaaattaatgataacaatgaaataagtaggttagattggccaactcatatcccaaagttaaacaaaatttttgtcttcaaacatttaaaaagagtgaaaatgcttcaaattccaaacaagaatttattaatcattctaattaaaggttaatatgatcagtaaaaatctaatcaacctcaacaaaagggatttagttaatataaaaaattgaggaggaaaaaaagaattatatagatacttaaagagacatgagttactacttattacatccagattcaaactcacactagttaatttgagaatcaaagtccttaattacagctaacatcctaattttgatatcaaggaaccaccatagaacagcatttagcatgatcacaaagttctcattcattatccttgaactggtgtggaatcttttgttatttatcttataaaattttgtaacgtcttgatgaagggaagactcgacaatagctagtcatagtatttattgtttattttaggaatattcttttactcaccttgtagaaggcaatctaaaaagttgtcaagcataatacttatcatttataattctttataaggagtgaaattctagtgtcttgactcttaatgaaaagcaaaactcaaaaagttgccaaatataatacttgtcatttctttaggatttttttacacgtctttgaccaggtcaagacttaaatttgaaataggaaaatgacaaggtaaatgaacaaaacaataacaaaaaagtagcagaaattaatttgatgatcgatttaattaaaactaatttaggcataaaatcatgggagaaaagtgaataagaaattttttaagagattgatttgacaactatttttaaaaaaaaaaataatacaatctactgtataatatggaaggatatcacnnnnnnnnnnnnnnnnnnnnnnnnnnnnnnnnnnnnnnnnnnnnnnnnnnnnnnnnnnnnnnnnnnnnnnnnnnnnnnnnnnnnnnnnnnnnnnnnnnnnnnnnnnnnnnnnnnnnnnnnnnnnnnnnnnnnnnnnnnnnnnnnnnnnnnnnnnnnnnnnnnnnnnnnnnnnnnnnnnnnnnnnnnnnnnnnnnnnnnnnnnnnnnnnnnnnnnnnnnnnnnnnnnnnnnnnnnnnnnnnnnnnnnnnnnnnnnnnnnnnnnnnnnnnnnnnnnnnnnnnnnnnnnnnnnnnnnnnnnnnnnnnnnnnnnnnnnnnnnnnnnnnnnnnnnnnnnnnnnnnnnnnnnnnnnnnnnnnnnnnnnnnnnnnnnnnnnnnnnnnnnnnnnnnnnnnnnnnnnnnnnnnnnnnnnnnnnnnnnnnnnnnnnnnnnnnnnnnnnnnnnnnnnnnnnnnnnnnnnnnnnnnnnnnnnnnnnnnnnnnnnnnnnnnnnnnnnnnnnnnnnnnnnnnnnnnnnnnnnnnnnnnnnnnnnnnnnnnnnnnnnnnnnnnnnnnnnnnnnnnnnnnnnnnnnnnnnnnnnnnnnnnnnnnnnnnnnnnnnnnnnnnnnnnnnnnnnnnnnnnnnnnnnnnnnnnnnnnnnnnnnnnnnnnnnnnnnnnnnnnnnnnnnnnnnnnnnnnnnnnnnnnnnnnnnnnnnnnnnnnnnnnnnnnnnnnnnnnnnnnnnnnnnnnnnnnnnnnnnnnnnnnnnnnnnnnnnnnnnnnnnnnnnnnnnnnnnnnnnnnnnnnnnnnnnnnnnnnnnnnnnnnnnnnnnnnnnnnnnnnnnnnnnnnnnnnnnnnnnnnnnnnnnnnnnnnnnnnnnnnnnnnnnnnnnnnnnnnnnnnnnnnnnnnnnnnnnnnnnnnnnnnnnnnnnnnnnnnnnnnnnnnnnnnnnnnnnnnnnnnnnnnnnnnnnnnnnnnnnnnnnnnnnnnnnnnnnnnnnnnnnnnnnnnnnnnnnnnnnnnnnnnnnnnnnnnnnnnnnnnnnnnnnnnnnnnnnnnnnnnnnnnnnnnnnnnnnnnnnnnnnnnnnnnnnnnnnnnnnaactaaaaacaaaatttatgtggaaaatgacttaatatatttttggaaataattcaatttcaaaggaaagatatcataatgcaaatatatatgaaattaaattttgaaataatttaatttaaaattaatcaaattgtgaagtatcaattcaaataattaacattactatattttattttttccttccattccaatcacaatcaaaattaaatgacattttttaataacatttttttactgttaaaacatctttagatgatgtttgaaacttaaaaagataaattaaatgcaaaagaattctattgtaattaaaaaattccactcaatattttgttatccaaaatcaagagtgcaaatcataaaaaaaattaaatcaatttttttataaaataaatatcaaaagaaaatatgtaagacatcatcatagtaaataaaaattatctaatatgtaaaaatatatttaaatatttcttaaaatattactaacatatatttattaaaatttaaactaaattattaataatatattaaatattggttgttgtggtgaaagaacaggttacgtttctactccccaacacacacgaaggaacaaaaggttaaaggaaaacgcgtgacacaatttacgcgaaccaaaatttacgcggttagactgtcaattgttatcattattcatgacttaatgttcttgtaactttactactttagaatttaagttgtatattttatcactttaaaacgctgtttactttatcactatagcgtcttggtctatgtgatattgagtgctcgttgctttttaactttcttttgagctacttccgtttcaaagttgggcttttttttatcatctcggggttttttttttttttttaattttttactcaaatttcattctatatccttttctttttacaccctaaaaataatttcttagttgtttcactcacattatacctagatcccctccgttctaaatattatttaataatttaacagaaattagacaatattgatcacatgacttttaataaaattttatgtctaaaatatcatcatcttcttcctctcaacctgaaaatatttaagactcttgtttcttttttatatttgctgagacgtaaatccaactatttggtggatgtgaacccactacgcaatgttaacacattcttctcattctttgtcctactaacatacatatgaactgaattttgattctcaacaaacattttttagtacatcatgatcagtcttaaagagaataattttactactagcaatagaacaaaaccacaaaataaaagggtgacatggtgacaagtttaaatcattagcaatgttattcacacactcatgtgcgttgaacattctaaatttatcaggatcaacattgtatatttcacttggttcgttgcgttggtccttaaagtggatcaaaatattcatgttgtccggttcaggatccatgtattctagttcatccattgtgttcatgtggtcctaaacatcaatattattttaatcaacaataataaataaatgattttaaaaatcataagtggtctcaaactagtcccccattgaaacccctatcagaaataagcaacaataaacaatcaaaattaaataaataatcttaaaaagtaacctatatacaaggtccagtggtcacttacaagcataacccttgcatgaacagaaatcgtggaacaagaagagaaacagaaccctcgtgaacgtcgaagaggaagacaaatggaggcgcacataaacgtcccgaactggaacaggaacagtggagaactcacgaattgaaagtggaacaatggaaaatttacaaactggaagaggaatggtgaagaactcgcgaatggtaaagatgaatggaatgtgaatgtcatgaaagaaagaggaacttgcaccccatgaaagctgaagaagaaatccctataagagggagaagattatttgaattttacaattaaaatataagagcaattttgtctgctcacatatttcaattgacgttagttaataacgttaatagagggggtaaaagtaatatgcaaaaaatgaggggtatcggataaaatttaagcaaaacacatgaggtgcaagtgtaatttactcttttttttaattaccattttggataaattttaaattaattattaaaaaggggtaaatcataaccaatattacgactcctgattcaaaagtcttaaccaatgttataacttttaatttttttaactgaagttatcaacaatttatgacttcaatttaattatttttttaaaatttataactttaaagttgtatcaatttttttttttttacgttttaaactgaagtcgtaatattatttacaattttnnnnnnnnnnnnnnnnnnnnnnnnnnnnnnnnnnnnnnnnnnnnnnnnnnnnnnnnnnnnnnnnnnnnnnnnnnnnnnnnnnnnnnnnnnnnnnnnnnnnnnnnnnnnnnnnnnnnnnnnnnnnnnnnnnnnnnnnnnnnnnnnnnnnnnnnnnnnnnnnnnnnnnnnnnnnnnnnnnnnnnnnnnnnnnnnnnnnnnnnnnnnnnnnnnnnnnnnnnnnnnnnnnnnnnnnnnnnnnnnnnnnnnnnnnnnnnnnnnnnnnnnnnnnnnnnnnnnnnnnnnnnnnnnnnnnnnnnnnnnnnnnnnnnnnnnnnnnnnnnnnnnnnnnnnnnnnnnnnnnnnnnnnnnnnnnnnnnnnnnnnnnnnnnnnnnnnnnnnnnnnnnnnnnnnnnnnnnnnnnnnnnnnnnnnnnnnnnnnnnnnnnnnnnnnnnnnnnnnnnnnnnnnnnnnnnnnnnnnnnnnnnnnnnnnnnnnnnnnnnnnnnnnnnnnnnnnnnnnnnnnnnnnnnnnnnnnnnnnnnnnnnnnnnnnnnnnnnnnnnnnnnnnnnnnnnnnnnnnnnnnnnnnnnnnnnnnnnnnnnnnnnnnnnnnnnnnnnnnnnnnnnnnnnnnnnnnnnnnnnnnnnnnnnnnnnnnnnnnnnnnnnnnnnnnnnnnnnnnnnnnnnnnnnnnnnnnnnnnnnnnnnnnnnnnnnnnnnnnnnnnnnnnnnnnnnnnnnnnnnnnnnnnnnnnnnnnnnnnnnnnnnnnnnnnnnnnnnnnnnnnnnnnnnnnnnnnnnnnnnnnnnnnnnnnnnnnnnnnnnnnnnnnnnnnnnnnnnnnnnnnnnnnnnnnnnnnnnnnnnnnnnnnnnnnnnnnnnnnnnnnnnnnnnnnnnnnnnnnnnnnnnnnnnnnnnnnnnnnnnnnnnnnnnnnnnnnnnnnnnnnnnnnnnnnnnnnnnnnnnnnnnnnnnnnnnnnnnnnnnnnnnnnnnnnnnnnnnnnnnnnnnnnnnnnnnnnnnnnnnnnnnnnnnnnnnnnnnnnnnnnnnnnnnnnnnnnnnnnnnnnnnnnnnnnnnnnnnnnnnnnnnnnnnnnnnnnnnnnnnnnnnnnnnnnnnnnnnnnnnnnnnnnnnnnnnnnnnnnnnnnnnnnnnnnnnnnnnnnnnnnnnnnnnnnnnnnnnnnnnnnnnnnnnnnnnnnnnnnnnnnnnnnnnnnnnnnnnnnnnnnnnnnnnnnnnnnnnnnnnnnnnnnnnnnnnnnnnnnnnnnnnnnnnnnnnnnnnnnnnnnnnnnnnnnnnnnnnnnnnnnnnnnnnnnnnnnnnnnnnnnnnnnnntaaactattttacgactacaattaaaaaaatgttaaaagccataacattggttatgacttttgaattaaaagtcataacacatattatgactcatttcttttagtaattaatttgaaatttactcctaaattgtaattaaaaaaacacctctagatagtaaaaaaaaacctcaaaattgagcctacaatgacaagactatatagaaaaataataaataaataaataataatatcttagtttatgattggatataattaagagagtttaaaagtaccttaaatctcaaaaacaataatgacaattatacactaacaacctccatagtctctcactcatgttaaacaaccttcacaagaagtgcactgaggaagtttttcctacaatgttcaaagcaatagtgattgtgggacagattttgaatttcactaatgcaatgacaaagggacaaatacatatgcaatgatgtcagatcaatcacatccgatgaaaataataaaatcatcttcacaagtggtgtgaaggagaagtagtagttttgtgcatgagccagaatgtttgggtctttttttttcttttatctgttttcattcttttttatttgatttaaaaattttcttctgctttttttactttttattttattaaatttgtttaataataaaataattttttttaatccatgtcatacgtgtttgatggggatcacccgctgtatagcggtttgcttaacattttccttaaagaaaaacactataaatggagtaaaaaaatattacatttagaggaaactataattaattttaacattgttgcaataatcaattagtagaaaaattataaatatttatactttttaattgttggcaatataaaaaattatctaaataacagaaaattattttggtaatgatttacaaatatattattatattaatatcaattgagtaaaattaaacattcaataaatatttaaaaataatttgataaaattagaaatattattttcatgaatttcttacaaaactcatttgtgcgcctttaaaaattaagtgcgcctttataaaggaggacatgatataaacacagcagaaggaagaaaaagcaaagaaagagttgaatcgaaatgaaaggctttgaagcagcgtaggctataaatagaagtttgtgaattgaattggttctatccaaaaatactctatagttatgttgttgagttgaaaggatgaatatgaataacaatgtttggtggcttctacccccatactttatcttccttcttctttttcttccttcttcttcctcctctttctgcaaccaccttgacacctctgccttgctacaactcaaatactcactcaacacttcaaatcatttttcttccaaaacagaatcttggaaacacggaacagattgttgtgagtgggatggggtcacgtgcgacatcatctcaggccacgtgattgctcttgaccttagcagcagtaatcttgaaggtcaactccatcccaacagcaccatcttcagcctaagacaccttcaaggactcaacctagcctttaatcatttttatggctcttcaatatattctggaattggtgatctggtgaatctcatgcatctaaatttgtcatactctggattcactgctcacattccctccacaatctctcacttgtccaaattactgtcacttgatctcgctagcttccacttgataaatggtgatcccaactccccgagaatgagaattgatccatacacttggaagaaactcattcaaaacgcaaccaatttaagagagctttatttagatggcgtggacatgtcttgtatgggagagagctctttgtcattgctaaccaatctctcttcctctttgatctcccttagtcttacagacaccaaattgcaagggaatctatcgagtgatatcctctgtttacccaatcttcaacaactatatttcaatgaaaatgaaaacctcggaggtgaacttccaaagtcaaactggagtactccactaaggtacttggatctctctgttactgctttctcaggaaacattccctattccataggccatttgaagtctcttaaccgtctagatctatcccaatgcaatttttatggactggttccctcttcactgtttaatctaactcaactctcctttttacatttaagatcgaataaattagagggaccaattccaagcgaaatcaataaactttcaaaattgcagtttctagatttgtcagataacaagttaaatggaacaattccacgttggtgttattctttgccttccttgttaaagttggatcttagcgacaaccacctcacggggtcaattggtgaattctcatcttattctttgatatacttgtcactctctagtaaaaaactgcgaggtaattttccaaattcaatatttgaactccaaaatcttactgttttgtatttaccatcaactggcttgagtggtcatctggactttcatcaattttcaaagttaaaaaaactatctagcctcgatctttctcacaatagttttctctctattaactttgatagtaccgctgactacatcttacccaaccttcgatttttatatttattttcatgtaatattaatagtttccctaaattcttagcaccacttcaaaatctgctccatctagatctttctcataacaacattcgtggaagcattcccccgtggtttcatgagaagctcttgcactcctggaataacatttattttattgacctcagtttcaacaagttgcaaggagaccttccaattccacccaatggaattgggtactttttagtctcaaataatgagctgaccgggaacattccttcagcaatgtgcaatgcaagctccctcaatatactcaacttggctcataacagcttgataggccagattccacaatgcctgggaacatttccttctctttgggcattggatttgcaaaagaacaacctttacggcaacatacctgggaacttttctaagggaaatgcattgaagactataaagttgaatggcaaccaattggatggaccattaccaaggtctttggcccactgcacaaatctggaagttttggacctgacagacaataacatagaggatacatttccccattggctagaaagcctccaggagttacaggtactcagtttgcgatcaaataagtttcatggtgtcatcacttgtttcggtgccgagcattcatttcccaggctgagaatttttgatgtctcaaataacaattttagtgggcccttaccagcatcatacatcaagaactttcaaggaatgatgagtgtgaatgacagccaaactggtttgaaatatatgggtaaaaacaattactataatgattcagtagtggttgtaatgaaaggtcgatccatggagctcgagaggatattaactattttcacaaccatggatttatcaaaaaatatgtttgaaggagaaattccgaaagtacttggagaattgcattctctcaaagggcttaacctttcgcacaatgcaatcactggtaccataccacaatcctttggtaatttaagaaatttggaatggttggacctctcgtggaaccagttgaaaggagagattcctgtggctttgatcaatttgaattttctggctgtgttgaacctttcacaaaaccagtttgagggtatgatacctacaggtggacagtttaacacatttggaaatgattcctatgctggaaatccaatgctatgtggattccctttgtcaaaatcctgcaataaggatgaagattggccaccacattcaacatttcaccatgaagaatcaggatttggctggaaaactgtagcagtaggctatgcatgtgggttgctatttggaatgcttttgggatataatgttttcatgactgggaaaccacaatggcttgccagacttgttgaaggtgtgcatatttgaggagtgaaaagaacaaataacagaatccatgcaaattgacaaggaatgcattagtttaatatggttctgtattatatgtgtttgtatgtatgtatttatttacaaaaatgtcaccgcgttaatttctaagacggtatttgatcaattgactttaaatcaacatcataaaaaaggctttttttagtagtagtattttttattttttttgtaatttttatcttctttgtttctgtgatgaaatttcatctcttaatattatcaagtgatctatttcaagttgatgtgcaaataagtaaatttagagatcaatcaatttttgttttaagttccatttatttgccataaattgtctaattagtcgtatcctgcaaaggcattaggaaaattcacgtgtccaaccttaaatcatcacaaaatcagcattttagtaggaacaaacttggatagttttcttgacgaacttagattttcgcaattgaacattcaagagaatcagtgtatattagattttccaaacaagctagatttgtgttttattgtttactagaagccatactaattaccgcactggatataaaatgaaacaagaatccatactaattaccgcagtggatataaaatgaaacaagaattcaacaacatgctacactttcaattgagactattttaacagaagttggttagaatttttttggttgacatcaactaagatttttaacctactttgatcgagactatttttgttgacgtcaatgacccaagccggcattggtgaaaagatagcgttgatcgacatccctccaaaatagctttagttgatgtgaccaaaaaataatatcgactgacattgatcgaaaaatatcctagctgatgtcaaccgaaaataactctggccaatatcaacaaaaaccatgatcgatcagtgtcggccaaaaaacataattgattgatgttgacttaaaaacctaatcaacgtcaaccaaaaatagcccaactttcatcgactaaaaaaaacctagccaacgtaaacaaaaaaatagtcacaactgacgtagaccgaaaaaatcctaacctatgtcaacaaaaaataaccctacctgacctcgacagaaaatattactgaccggcattgattgaaataacctagccaaccttgacaaaaagatagttccacatcgataaaaatagtcgattgacgatggccaaaaaaaccctaacagaaattgacaaaaaacatttgtgaccgaagccgactacaagcaaccttagccaaaataggttgaaaaaaaatacccgatatacaactttactaaagaaaatgtaaaatattattactaaaacacatggaaggaacaaagtagaaaaccctaaatcacagatattgatccaaaatcctaacactccatggctgcgaaaattcaaaatagtttttgtttacctacattctccattccaacctcaaaaccctacttaaactcgttcaccgtcttagcctccaaatccatctctggacgaaagcttcgagcgacagtgattgatggtggcctcgctggatcctccgcagcaaaggccctagcctccaacggcgtcgagacttcctcttcgaacgtaacccaacatccgttgtgaagctgtgcggcgcgccatccctctctgcatgctctaagagtttgacattcctcaccacctcatcgaccgtcacgtgatgttcatgcgcatcttctccccttccagcatcatcgtcgacttcgaaaaaagcctaaaaccccacaagttcattgctatgctccactgcgaggtctcgactccttcctccgctcccgcacacatgttgtagagggttttctacgtagtaatgcgtccaggaaggctctagtggaactatgtggagatgagtatgttcgacgcatgacgtttgagagctatttgtataagaagttggcatgtgggggagtgttggatgatgctaagcttttcgtcaatactattgggagcttggtgaggtttaaagtgttggaaacaccatgcatgtagagtttgatactatgactttggaaatcccactaagtggatgtagcttctgggtcattttgacatggttttgctgcttgaacgttgatctagaacgtgtttccaaacatgttctaaatcatttgtttctgtaatttttgtgtactgtattattatgtaaccttctaatggaggcacttttgaatttgatggaatggtggattgatcaccaattcactaacacttctttaagaattgttttattcaaatacaaaagaatatatacaaaatttcattggttgatgtcataattcaagggattaagtaaagcaacaataaacttatacaagaatgagctcatttgaccatccaaatcacacatcgaagacactgtccttcaatcaataaatcaaaagctttgttgatatccttgaactccacctcatgtatgacaaacccatccaaattcagtttcctgttgataattgcagatgaaattcagtaccaaacaaatgcatgaaaacttggaaattggtattatgtcatgttatttaacataaaattggtattatgacaaactgccgctatagtttccagatgaaatagaacaacggctattcatacatatgaaacatacaatgcaactaagaagccattaaaaagtacagaaaaagaaaaaaacaagctagaatagtcatggcttgcctttacatcttagcatctttagtgatagatcttaaattgtgattttagatcactttttggtagatttcataatttcacgtaggattgaagatctctcaatatctctctcattttttcctttagtggtagatctcattttaatatcttagggagagaggaaaaaaattattcttttttttaacaatgtgcagatatttatgatttttttacaagaattcatttttcatgttagagatctcttcacctcctttattgagagatctagtggactcaagatctagcactaaaaatgcttataggttgtccttcagttgttgccaatttatgttccatggcgatccaaaacacaagatgagtcaatgcaacatgttagttatagtgtagagaggatttgggagctgatctatgaaatatccttagtgaaaacgacaaaccaagtacacaaacacttttgctacccatgaagctaaacatatttaaataaagcaacaatttaaatgttactcattcagtccttttttgttcactggtattctcaattctcatgtctcatctcagcctcacgcagctgattctctcccttttttgatattatttttatgagctgataaaaacatatttaaatgttactcattcagtcctgtaggtattaacacaacattttaggtttcagtcttatatacctaagaattatttgttttagttattgcatatatatgtttaatttttttttaatctctgtcatctaaaataatactcactcccgtctcaaatataaagaatatatctttttcttagtctcaaatataattttttaaaactaattttatcttatttaatgttattatatctaaaatatttttcatttagttgagaatttagtttcaataactatttttatattcctaacatcaagttccaatgaagaatacgttggaaagaaaaattagattttaattgagattggtgtaattaaacatggttaactaattcttttaataaatgtgactcaattttatatatatatatatatatatatatatatatatatatatatttgagacctgagagagagtatgaacttataaagcattatgtgtaaaggataataaaagagttaaaaagtgaacgtgtaatgactaaaatgaacagtttttaggttcagagacacatcttgaatgtccagatatcttccacttttgagaggacattgaagaaattattttctcttatttgcaggaagccaatatgaagtatgttgaagacatagttgaaaacatgcaaaatgccttgaactttctgtactggttaatgtcgtaaagtgaaccaagataaaactactattttgtgctttttttttctagcaatattcattattattcaggaagaagggaaataaatcagtcagaccttctgcttacaaggcacccaaatatttgggagttccctgaattaccaaacaaaaatgtgtcacaatgtaaatattatatgtttataaccttaggcgtatgtggaatccaccacactcgggtgccgatcgaatacatgtaatgtagtattatgtgatttcaccatataacggagacacatttgattaagcatccgcgtcaaggggaatggaagacatgtcattcatgattattataattatagcttaagcttgcttttacaatggaaattagccatcacagaaaatagataatagtaaaatactttgaagcattgttggtcaccatcaatttattactttgctgggcatcaactgcttttacatatgttttctccaaatacaaaaaaaaagagcatccaatattttacttattgatgtcataattcaagggcttaagtaaagcaacaataacttgtacaagaatgagctcatttgtccatccaaatcacacatcgaagacactgtccatcaatcaataaatcaaaagctttattgatatccttgaactccatctcatgtgtgacaaactcgtccaaattcagttcctgttgataacaattgcagatgaaatttactaaaaagaagcatccccagaacttggtattgctagtatgttatgtcattgttatttttacataatcattactaattactagttttacatatattaataaggggacaaagagcatagactaaaaaagactaagtaaaagaaattgcacatagtaccttgtccatgtagcgtttaaggagaatgggtacatgagacttgggtttgagtcctccaaataagcatcccctgagactcttcccactaacgaggacctcactacagctaaggttcaacttggattctggcttgtccactcccaaaactattgtttttccccaaccctgtaggcaaagtgttgcgcactcggcaagtgtaccggtcgtacaagtaataaagtgataagaaagtgtatcgttccctcgaggattgtggaccaattaaatcataaattgtatccttaggttggatgacaaaatgtaactaagagaaatgtgttgttgaaggaagtaaattaaaagctaaatgtaacataaacataaacataaagcattatatacaagataggtagtggttataccaaacgcaaccttaagtaactagggaacccacattcaacactcctagcattcttcatggattgatttcaacattcatctacactacctactcaatcatgcatcctcattcattaatagttaaaccctaattccttagtgacattaaccctttaaccctttttcataccctaattccttagtggtattttattaggttaagcattaagcgatgcactataagattgcaagcacccatccctattcctaggtgatattagcaagtcaccacacttagttccaagactaaagccccaatatccctattgtgaaccctagctctaagctctcaactaggttgatcaagtctagagaagagaaggaaacattcaagcaaagtgtaatgaaataacatagcattaatgaacattaaatacaacccaatccaagtggaagttacattaaatgcttgccttaaatacaaaaggaaactaaccaaacctagacaaggctggccttggtacaacaaaaagaagcataaatgaagagatgtaagcaaggagaggaagggaagagggaagaaccctcttcccctcacacccaagccctagaatcaactcccaagctttcttcttcctcctttggtgcatattttcgtgccaaaagtgcttagaactgaagtgggttcttgcatttatacttgggaaagtgaaatcccaagtttggcccttgacagcacaacagaactgcagatttaagatctggcgcggatagcgtgggacacggcgcgggtcgcgccaacttccagcaagaatgccatttccagggcagtactcgcgcggatggcgcgagtcttcacgcggatggcgccatctggagctcagatggcgctggtagcgcggtttgtggcgctaatcgcgccatgacttctcttgatcttctctgcatctctttttgcttatatttcctgccaaacacttcaattttgaccaaatatatcatttaaagcatgtgagtcacattcataccaattgggagcattttatcatataaaatgatgcattcaatggcttaattgagcttggaaacatcatgtgctaggcacatatcacaaagcattagttttaacaattcatgcattcaacaagtatggatcagttaagaaattacaatcaagcctacctcaaatttggagggaaacttcattttcatgaagtacaaggaagttgaattagttagcacaaaagaaaactagtaatacttttaagtgattttcaagctttgtgctagggtgatagtagaaaatcatgttgtagttattgttacaatataatcgcattattctgtcttcctataaaccatagtgcaaggcatgtttgtgcacacgttgataaagagagagagagagagagagagagagagagagagagagagagagagagagagagagagagagagagacctttctacaagaagcatatgcttcctgcatcaatgatgccataccaacacattcaaagcaataatctgctcccccaccagtcatctctaagataacctgcttcacaaccccaaatgagaagaaaatctaaggacttgaggcaattaattaaattaaataaattaagattggagcctagaagatggtagacctggctcacagatttattttcacattctccagaatggacaaagtctgagtccaaacttctttcctgaataaaagccaaggaacaaaccaaaataaccaattacataatctgagcacaataataacatggacaaaaatatatttaaacattactgcttaaggaaatgcttgatgtgatattattaaacaaaaaagcattaccgatttcatatctttctgggttgacatccactcctataatcttggttgctccacaaagtctagctccctcagcaacctatgataccaatggcttgcaatgtgcatttcaatataattaatcacaaaataccgaaagaaaacagagctaaacggacaccatactgctaatccaatactccccagcccaaaaatagctactgtagtccctggctccacacctgctgcttggagagcagcacctattcctaaaagtggaagtttaatcaatatattgaattcatgaatgttgttgagtagtgatttaaaatgtaaaaacaaccccttgtatttattataaccaaaatttatactacctccggtccttattataagaatttacactatcacttgtttcttataacaaggaccagaggtagtattatgtaacatatagttcttctctacattaatgtttgcatggtttaggcaaattacccgctgatataccacagccgatgaggcatgccctgttgggtggtattaccggatcagtcttgactagatgggcaatgtcgaccacagtgtactcgataaaactagaaacagacaagaaatggtgtatgatctctccttttaaatctgtgaatctagaagtggcatatctaggcatccagggagacacctcaaaaggaaactttgaacaaaggttgctcttgcttgatttgcaatctacacactccccacaatcaggtaagaaaattggaacaaccacatctccttttgtaacttcagttacatcctctcctacactttccacaaccctggatcacataaaaatggtctggaattcatcaccagttcctatagcatcaaattaaatgtctgaacaagtagatccaatggggcttaaggtggcaaatcattggcagccaacatgagataaaaggggcaaacatagagttgtagaatttcttaataaatcaatggccaaattattgtcattgaataatcaacaggccagggcttacagatatgcctttcccttaatcaaatccatgctcaaaattgaaatttgaaacactacgatttgtctcaacgaccatagttattcattcgtctccctaaaagctggatttaaaaaattaactactcttgagttggctcttcacaacttaagtgcatatgtaacacagaaaacacatgcagttaaacgaaaaaggtcaccaaaacttatgataggaaatgtttttctgaggcgtaaagaccacaataaatttttagtaaacataaatcaaagcaccaaagtttactctaccaaaaaaatgaaaaaaagaagaaaagtttatgttgatacaggaaaagcatacacatttagcataccatcaaggtagtggaatccttatgagaaaagagggtgcaaaataaaatgcataaactcaccctattgcctcatgacccagaattcttggataaatggcaggatggtccttcaaaatatagaaaatttatcttaaaaaaatcattaagaaatttccatagaaccaaaagaaaaagtaatctaaattctacagaaattgaatgaaaatgaaaaggtggtatagggaaggcattggctgagaaaaatgtcccaaatcacaataaatcatttagagggaccaaaaatggtggcaagtggcaacctgcatgttccgaaaactgatatcagtttgacagagagaggagcatataatacgaatgcgagcttcaccaggcattggtggtgccacaatgatctcctcaatactcagtggctcaccgggtttgcgacaaaccgccactacagtttacaaatgaaacagaacagatagagttcatacatatgaaacatgacatacaattaagaaagcaattaaaaattactacaaaaaaagaaaatggtagagcagagacaacattggtttgttttcaggaatgatggcacaccacacacctttacatcttatggattgtccttcagttgttgtggctactttgtgttccatggctatccaaaacacatgaggcaatgcaacgtgttagtgtaattgtatggaggatttgggagctgatcaatgaaatattaaatatactaagtgaaaactaacttgatgagggatatgactaaagttcagagaaagtgaatatagaaacgtcagatggggacttatgaaatagggacaattatatggtacaaaccaagcacaccgacatttttgcttcccttgaagctaccaaactagaatggtttcatttttgcgggtcactctcagcctcacctacctcatcttttacactaattgttagtctcattttgatgagttgataaaaaagaaataaatagttgtttgttgattatgagagtaaaatttttagatgcacccacaaatttcagaaaaaaggtcaggttttagttcgatgtttgtgttatcctttcttatctagtttttgaggaatcaatcttctactgtgacattactattattatacaaggttctaattttttttaataatttttatatattaatgttatatatttctattttaaagttgaaattttaaaaaataaacaattaggtcctgtttctgcattacagatgtgacaactggaaaattaaatgggaactttgaatttccaaaatagagaaagagacaggtattaactgtcattgtgcatgatttgtggtccatttttttttttaatctgagctcttatctactgttcttctataagatccggtgtaacatgattccaactctatcttcaatgctctaaacaaatcaaggttttattgatatttttgcctctgatctcactttacggtttcttttataaaaaatcataagctttagcacttacatatttcatatgaattaagttttgatttctactggtaatatcatcactaatgtgactgcaaatacaccagtacaagatacttctgacagtataaaattattaaaaatttctttcacagcagaaaaataagagaaattgtgatgtgttcaaacttattatattctcagttacttctgaaatgtcttgatatatagatagtttaacagattcaccgaaagaggctgatttttcattttttgcattattagcttatttaataattctgataagctattcatactctaggatgatgattgtattattaccaccttgatccagattcaactagtgcaatcattgacattgtttcaaataaaccatttgcgtatcaatatatgccagaggaaattgagaatgacataggtttaagtagattgtgatttcctttattttctattatggaagaaatttgtggctgttttgcattgttagaaaaactttatagtagtcttaatagcaacactgccaatcactttagtaatgatgttaaccacaaaacgaaacttatgtgtatgtaaatgattaaaatttaaattttttttatagaaaaaattataaagctggaacataggtagggagcaatatcaattaaaccataaagaaataataaagatataaatagaaaaatatattatttggatgaataaaataaaaatagtataaatgtataaagcaagcatgttaccgatgaaattgtggtggattgtcacttatggcctaagcttgtttttcaaatggaaattggataatattcaatgcatgattatttgtcacaaagaaatgggaactgctaaacgatgctgtttcagggaaacagatactataatacttttaagcattgatgatgatcatcaacctttttaacaattactttgttgggtatcaactgcttttacattgaattgaatatgttttcatcaaatacaaaattaagagcagtatccaacattttacttgttgatgtcataattcagttgctcaaagcaacaattactttacaagaatggactcatctgtccatccaaatcacacaccgaaggcactgtccttcaatcaataaatcaaaagctttgttgatatccttgaactccacctcatgcgtgacaaactcatccaagttcagttcctgttgataattgcagatgaaatttactaaaaagaagcatcccgaaaacttggtttatggcattattattttacataatcatcactatgttaatagaagggatcaagagcatagactgaaaaaaattaaaagaaattgcacaaagtaccttgtccaggtagcgtttaaggagaataggtacgtcagacttgggtttgagtcctccaaataagcaccccacgaggctcttcccactatggaggacctcattacaactaaggctcaacgtggatcctggcttgtccactcctaaaactattgtttttccccaaccctgtagggaaagcatcagttttaacaagattccacaagtttgcatctgataagagtttattattaaaatttgcaatcaaacctgtctcaatttgacaggaaacttcattttcatcaagtaccaggaatttcaaattagttagcacaaaagaaaaactattactagtgctacgtttagtgctaggttgatcctttaaaattattctgcagttattatttcaatcacattactctgtctgcctataaaccatagtgcaaggcatgtttaggggcactttgagagatagatagatagatagagggagagggatagagagagagagagagagagagaggagtgagacctttctacaagaagcatatgcttcttgcaccaatgatgccattccaacacattcaaagcaataatctgcccccccaccagtcatctctatgataacctgctaaacaagcacgtatgagaaggaaatttcaagacttaaggcaactaaattaaataaagattggagcctagaagagggtagacctggctcacagatttgttttcactttctccagcatggacaaagtcagtgagtccaaactttttacctgagtaaatcagaggaacaaacccacaaaatcaattacataatttgagcacaataatgacacaaaaatttatctaagcattatcattatagcagataatgcattaccagtttcatttttttctgggttgacatccacacctataatcctagttgctccacaaagtctagctccctcggcaacctaggaaaccattcacttgcaataagcgtttgagtataataaaccacaaaacacaaaagaaaaaaaaaactatgtggattccttactgctaatccaatacttcccaacccaaaaatggctactgtagaccctggctccacacctgctgttctccaagcagcacctacccctaaaagtgcaagtttaataaaaatactgaattagatgaacgttgttgagtagtgaactaaaatgtgaaaacaatcgtgtttatttatgatcagatattttgactataatttatagtacgcaactgatataattcttcaatattctttttctttaatgtttacaattttgcatggtttaggcaaattaccggttgatacaccacaactaagtaggcatgccctgttgggtggtattgctggatcaatcttggttagatgagcaatgtcaaccacggtatactcactaaaactagacacaaataagaaatggtgtatgatatctccttttaaatctgtgaatctagaagtggcatgtctaggcatccaaggagacacctcgaaaggaaactttgaacaaaggttgctcttgcttgatttgcagtctatacactccccacaatcaggtaagaaaattggaacaaccacatctccttttgtgacttcggttacatcctctcctatgctttccacaaccctggatcatatcaaaattagctagaacatcatcatcagcttctataatataacatgcagaagatataaaggggctcaaggtggcaaatcgttggcagccaacacaaaaataggtagcaaagataaatataattagtcgtggaatttgttcttaaatcaatgttcagattactgttgttaaaacatctgaaggtttgcagacacactttgctttgttatttaatccttgatcaaaattgaaacattaaaatttgcctcataactatccaatcttttctctaggattgaatttagaaaattaactactcctgatagttagaccacaaagatgcctctaaacaattttagcaggtgtaacacagaataccttttttttcttttgaaaggaaaaagtaatgtattgaataaaagagcaaaggtttgagcacaaactggtcaaaaccaagccattacatgtataaaagatatagcaatagagcccaaaaagacaagccccctaacttaatacaactgatgtatgtagaaaccacatctgtaaggactaggcagtaagaaccacataaagtttgaccaaacatttatatattaaaccacaaaagtttactctacctacctaaaaagtaaagcgcaaaagtttatgttgatacagaaagatacaatacaaacaggatattaataaacagtggatttctttttccttaggaatgaataatattatccagtaaataaaattatagaactaaaaagagtgaaaggaatacactcactcacccaacagcctcatgacccaagattcttggacaaattgcaggagggaccttcaaacacacacacacgcacaaaaaaaaatcttaaaaaattcattaagaagttccactaaggcttctaaaaaaagaaagatatctagatcaaaatagtgtgaaagtaaataaaaaatggtaaagggaagacattaactatgaaaaatgttttaaatcattcaaagagaaagaaaatgatggtaataacctccattttccaaaaagtaacatcgctgtgacaaagagaagtgcatataacacgaatccgagcttcacgaggcattggtggtgccacaatgatctcctcaatactcaatggagaacctggcttgcgacaaattgcagctacagtttgcaaataaagaagaacaagtagtaccatttattcatatgaaacataaatatcaacttcaaaaagctaaaaatctatttgaaataataaaaaaagagcatataaacttttttgtttttcatgaataatggcatggcacacctttacatcttctgggttgtccttcacttgttgttgctagtttatcttccatggcgattcaaagcaaagatggtgagtcaatgcaccaagttagaagtctaagtgcagcaaagagttgggagctgacctatgaaatacaagtgcaaatttgggtcaaaaagataaatgtgtaatgaattattattatatacaattatacaatattaatattaatggggtgcatgttgaaggaaatgacttataatatgagtgggtatagaatggtttgatggagacaaattaactaaggacagctacattttctcttccatgcatgtgaagctacctacctagtttggtattagcatgtttgcaggtcaccctcagctatttgtttgttaccatctaaatttagagagaaaaaatcagaaggttttaataatgcatatatgcatgtttgaaatatacgttttctcaatccaacaaacatcaatagcttttattgactagtttttggtttttaacataacatatatgacaaatttttatttatgatcatcacttgatgatgtttttctctccaaagtccaaaccaaaatttgcacctacccaccttggaattgcttttgcggtagatgaaacaatgtttaacctaatttatgtttagtatactaccctcctcccttttcggaattataggcattaattatatgaactttaaaatattcggaaaatattaattatatttctattactttttagatgaaaaaatttaaacataaattattttatttcaaactctatttttacaaaattaattttataagattaaaatcatttaaaattaaagttgatgaatgcacatctaaacacactaaattgtgaagcggccggtcgtcaatttaaaattgcgaaaatatacattcttgattaatttgacatttttgactttttagaaaatgttagcttcactcttatttattctgctttggtcgttttgtacatgacaacacagaatcacgtgtccggaagtgcgaagtatcttaattaactctgatcatatatgatcgagatgaatgaataaaccaaattcttgctacacaaagtttgaaggttccttgttagaacaatatcacgttgcaaactaacgagacagtattgcaaagattttgctttggcttttaactagtaaaaaacctattatgctttagtgccctcaacattttcttttttgttttatatatcgtcctattatgctttggaggctgtgattaagtattttgttagtcacaaactctttgtttgtttgtttttttgctgttttttttttcattccagatttctgatcagaaaaatagaagagtatgcttaatcgaacgtttgatgttctatttatttattgatagttttaaataaaagaagaagaggagcatgtttagtaccatacattgttttgttgcatgcttgataaaagttcgagaaaaaatggtcaacgaggaaagtagtaaatataatctaatcagatagacatgatttaaaagttgaaccaaatgttgagcattcatgagttattagtgcatttattgattgcaatttgctatttgtgattactatattttatttaataaataaataaaaattaatacaatccatgtttgaatttcattacaattatgaatatcacattgactatgtaactaataactatataaagatgacaattgaactccaaacatgataatataagtgtgaagtactattatagcactcatcttatctttctttctcttacacttattaatttagtaatcctttccggnnnnnnnnnnnnnnnnnnnnnnnnnnnnnnnnnnnnnnnnnnnnnnnnnnnnnnnnnnnnnnnnnnnnnnnnnnnnnnnnnnnnnnnnnnnnnnnnnnnnnnnnnnnnnnnnnnnnnnnnnnnnnnnnnnnnnnnnnnnnnnnnnnnnnnnnnnnnnnnnnnnnnnnnnnnnnnnnnnnnnnnnnnnnnnnnnnnnnnnnnnnnnnnnnnnnnnnnnnnnnnnnnnnnnnnnnnnnnnnnnnnnnnnnnnnnnnnnnnnnnnnnnnnnnnnnnnnnnnnnnnnnnnnnnnnnnnnnnnnnnnnnnnnnnnnnnnnnnnnnnnnnnnnnnnnnnnnnnnnnnnnnnnnnnnnnnnnnnnnnnnnnnnnnnnnnnnnnnnnnnnnnnnnnnnnnnnnnnnnnnnnnnnnnnnnnnnnnnnnnnnnnnnnnnnnnnnnnnnnnnnnnnnnnnnnnnnnnnnnnnnnnnnnnnnnnnnnnnnnnnnnnnnnnnnnnnnnnnnnnnnnnnnnnnnnnnnnnnnnnnnnnnnnnnnnnnnnnnnnnnnnnnnnnnnnnnnnnnnnnnnnnnnnnnnnnnnnnnnnnnnnnnnnnnnnnnnnnnnnnnnnnnnnnnnnnnnnnnnnnnnnnnnnnnnnnnnnnnnnnnnnnnnnnnnnnnnnnnnnnnnnnnnnnnnnnnnnnnnnnnnnnnnnnnnnnnnnnnnnnnnnnnnnnnnnnnnnnnnnnnnnnnnnnnnnnnnnnnnnnnnnnnnnnnnnnnnnnnnnnnnnnnnnnnnnnnnnnnnnnnnnnnnnnnnnnnnnnnnnnnnnnnnnnnnnnnnnnnnnnnnnnnnnnnnnnnnnnnnnnnnnnnnnnnnnnnnnnnnnnnnnnnnnnnnnnnnnnnnnnnnnnnnnnnnnnnnnnnnnnnnnnnnnnnnnnnnnnnnnnnnnnnnnnnnnnnnnnnnnnnnnnnnnnnnnnnnnnnnnnnnnnnnnnnnnnnnnnnnnnnnnnnnnnnaataatgagtttagttgtacaacatgttaataaatcaaaaatcataatagaaatgtctcttaaggaggcttttaccggcattttttatatatatatttccaaacaaacactgaaaataactttaatttatgtttgtttcctgtacaaatatttgaaaataggaaagattaaatataaagtggcagttttataattaaaagtaaaaataactattatcaagcatgtagatcaagtgatataaaattgtttcggcatggtcaagaacaaaaataaataaaaatggaaaataagacacccttgagcttttaagtaagtttgtttaagcttattttttaaaataagtacttgttaataaaataagctgatttttatttttatgatgtatttgtttaaattgattttacttaaaataaacagttttctacttaaatttatatgtaatttatttttattatgtattttttacttaaatttaaacaaactcaccattaatatagtgagtaagaaaataaatatttgtaattaaatgtttatgtaatttaattctttggtataatcttatattaaaaataatatttttggtgtcgaacaagttcactataaataatagagatgacaatggagcgggacgggaacaagtttgatgtcccccactctcatccctgcttctaaaaatcgtaccttttcctttttcgatctccgttgggaataacattttacacctatctttgttcccatagggacgggtatcccgccctgtccccatccttagtccattgattttgttttttcaatttgcaacagttttttctaagagaatttcaaaaaagatattataaatggtgcacaagaagtgcatgtgattggtaaacaaaaaagcatacttcttgtgttagtattcaaggactacaatgcgtgcaagtgcgacacgaccttgcatgcaacctttcgagtttgcgacaatagtgtgtggttcgacaatcgacaccaacaatgcaaaatgaagggtgtgatcgacgtaaaacgaagagtatggcaaactagagttcaacggaataacaacacagcgacgcaacaaacactaccctcaaagatgcaagaccgcgacatgaccgttgacgtgagagatgattgtatgagagagacaagggttggcagccagcgacgctaatgagtagtgaatgagtgtgacgacgagtttgagagtttatacttttttattgagcaagtgtatattgtgtaaccctatgtaacaccccgtaggcctccggtgcgttatcattaataatatcaaaatcgtgctatcagtgttaacataaaagctgtgcggaagcgtaagaatcgattttcttgcatacattatgcatggaaataaaatcacaacacaagcatcataaatcaagcccctgttgatccaaaatcaaacacatacatcataggcagatacagatataaatcttaacaccaaaatcaggaggaagaaacatcatagactcatacataaaaacatactttttgtacatatacataacagaagctagaccacatctgggtcatacatcaaaatttgtacagaataatgggtgtacacacacaccctatccctacacaaggtacaagatagagatcaacacaaaactattctgatctttaactgcagccctcaaccacctcagcactccactagggcctcctgcccagaggtcgctcctctcccctagaagaagcacatgaaaaccacaaccctacacagggtgagacatacgtctcagtaaactcagggttctgggagatccgcccttatcctggttcacctccaagcacacacacaaaaccataaacacaaccatagcctaggacatcatcctagctctcttcacccggctgccgggtatatcactggatgctatcagcatcagaggcattccacctcatactggctctcacatccatctaaacataatctcacagagccaatacagaatcatggcgtaacaaccaatcactggctctcacagtcgtctcccagaggtactaaagcataagtgtcaaccactggacactttctataccagagaggcattgcctcataaactgtatagcatattgcctgaggcacccctcaggacttcactcaaacagatatggctcatctaagaggctctaggcccttatcccctcgggttgccctctcttagggatacaacatatctgtacacagtcaggcctgggcaagaacatccatgtagggcaaatcacctccaggaccttcacatacatatgcctgaaagagatcatctcataccagaggcactcatctttcaggacttccagatctactgcctgagagagatcatctcacacaggaggcactcaatcccttaggatttccaatcacggtctgagagagatcatctcacaccggaggcactccatccctcagactatcaatccactacctgagagagatcatctcacaaaggaggcactcatccctcagggcttccaaatcacatgcctgaaagagatcatctcatacaggaggcactcatctttcaggacttctaacccgctgcctgagagagatcattccacaccgggggcactcaatccctcaggactttcaaccacatgcctgagagaaatcatctcacaccggaggcactcaatccctcaggacttccagaaactggcctaaggataaccactcagggctttcatcatcactgcctaaggaggaacatccatacggggcaatccgtccttaggactttaggtggagagcagtggcacctcccaaggagtatcagccattcccagggagtcctcaaactcttcctctggctaggaaatctcatctagccggatactattccagtatcctcttgatgcaaacacagaccataccatggtctttttcctcagattcaatcatagaacactaacatagtgttcatccatcaaaaaggcccaaggcccatcacagctgtaccacagatgtatcattaccctcacactctctcagtgtctatcctggggtttaatctcatacataagcacattaacacccttccggtgtttaactaatcataatcaaccataggccacattgaccttgaacatgcaacatatatatatatatatatatatatatatatacacatccatggcataattaataccccatcacccacttgggtggcaaacaagcgtaagggaacatatcccagaacgatgagcttacctggcaaaccgtgcctgcagctccaaccttcatcaatggtctgcgtccttgacaatcacagtgtcagccctatcaaggcatacaagcacgtatcacagcccattcaagaacctaacatacataagctcatctgacttaaggttcatcaggctcatctaccacaagcctttccatggacccttcgaggtctatatcagatcaaccatggcctcagagtcattcagactcaatccaagccattcacaatgagctcaaagctctcacaccctaactactcagggatttccatagggtttggacggttcaacccccaagacaccgtcaccaaggcctctcaggcacctcaagcccatcaacaaggctcttgcatgtatcaatatcaagtgactcaatccaagtcacacatgcaccacctagagccaaaaccaacattcaccaaatcacaaactgaaagctaatccttcctcctctcatcactctaaacacatctctcaacttgacccagagctaattctagctctaccaagagtgggtcactattcatcaaaatccccaattcacaaaacaaccaaagaatctcgagtttcttacctcaatgacgacacagcaggcctctgggacactcctccaagcttgggtgtctgtgggtagctgtcgttcctcgccaagctcgagttttcttcacttctcttgagaatggggtttctcagaacaagggatttttggtgaaatggaggaaggattcaagctctctcaaggtttctaggaggtttgataggtttaggaagtgtttttggtgaagaaacaaggtcatggaagcttggggagctctcccatggcagacagggcactgaggaagaagaagagaaggttttctcttctgaaaacgcgatttccccttttatactgggtctgccagaggtttggcgctgaccgcgccagcttcaccgaccttgtggcgccaaccgcgccacacccgcgccatcagcgccaacttcccgaacctgtggcgccacccgcgccacacctggcgctggccgcgtggaaaaccagagggaattggttttccaggccacttcccgcgccatccgcgccatccatggcgctaaccgcgcggcctgggaatcatctggcgctcccagcgccatcctggcgctcctagcgccacattccagtgagtctggcgccaccagcgccatccctggcgctatcagcgccacacccttctcagggttttctcagcaagtcttctggcgccatccccgcagtaccccacgccatccgcgccagaagtctgggtcttacacctaagtaatagtaaaaaagtaatttaataaccacagtaggcgccgaggatggaaacaggaatatatgattacccatcctcattcatgtacataaataaatcacacgaataatactcgaacaacatgttcatatccaatcaaatcgagtattttttgtctaagatggggtgacatatgacaaatatatgcgagttcggatttctttgtcatccctgataaataatttagaattaaataattatgtgatatatatgctatttagtaagtatttattcataaataatttgtttttctaaataattcacaatataatatatatatatatatatatatatatatatatatatatataaaataacttttcccactctttttctgcgctttattcagattttggttcttctggtcctaatccgaaacagaaacaggggattcgcagttgtggagtagatctgagttgtgagcaatagattctccaaattttgcgggcaatgggtgggttcaccgctgaagatctgtcgaccatcggcggaatcgccaccgtgtcgcttctccattccttcattcccactcactggcttcctttctccattgtcggtcgcgctcagaaatggactctctccaccactctcatnnnnnnnnnntttagaattaaataattatgtgatatatatgctatttagtaagtatttattcataaataatttgtttttctaaataattcacaatataatatatatatatatatatatatatatatatatatatataaaataacttttcccactctttttctgcgctttattcagattttggttcttctggtcctaatccgaaacagaaacaggggattcgcagttgtggagtagatctgagttgtgagcaatagattctccaaattttgcgggcaatgggtgggttcaccgctgaagatctgtcgaccatcggcggaatcgccaccgtgtcgcttctccattccttcattcccactcactggcttcctttctccattgtcggtcgcgctcagaaatggactctctccaccactctcattgtcagtacgttacgttcctctctctctctctctctaattgcgcaacttaggtcagcaacggttttttttcttcttttgttatgtttcttgctctgtgatgcgcgaatcttgtcagggtttagggattgtgcttttcttctgtttgggtgtgagtgagcagtgaaaggatattaaattttctcacaaatgaatgacttgagttctgtttaaagatgaaatctagtgatgcggttatgaatttttccatatcctcttgcaacctctcttctcgaataaatctatattatacttttgaaaacgttaggttcagaatcgttatatgaaatgaaactctacaaatttaaatcatttgatatttgacttacatgcttaaaagcactccaattatgctcacattctggcaaactacaagccaagctcaataattgcaagtttttgcaatgatttgttgtcctccgcgactcaactgtagtgcaaaagttaattgcattagtatttgcatgaattgttatgtaattaacttttaaaataggtttaaatacatttttcatcatgcaatttagcgtttttttcattttcgtcactgcaaaaaaaaatgttttattccttgcaaactgtgtttgttttgtttttcgcccttaaagtgatttatataacacattttttaatgttcaaagcgctatataaaacgctttaagaacgaaaaataaaacaaacacattttacaagaactaaaacaatttttttttttgtaaggatgaaaatgaaaaaagtgttagattgcagggacgaaaaatgtatttaagcctttaaaatattaactttcacttattaggagccattctagtcttttgccttgttgctactttcgatccagctttctcatatattgacagctcattttaaaatatgatttattcattttaactaaacttctcagtgcttttatcacttcatgatcagctattcttggctagctataaagaacttaggatttagaaaatgacttgttggatgcaatgtatgttgaagttgacactctcatcttcaatcaatgattgcgaaaatttctttgtacgtccttgttgccattgaaagcactctgaatttccttcttagccctatccactgtttcatatatgtatccatcccattgcatctgcctttattcccatatgatgtctagcgcaaagactcagaagactgtgttcttggattttgtccataaagttttttaaccttattcattttatttcatgtagctgcacttggagcaattttgcatgtaatatccacttcactgcttggtataacggcaattaccatggcaaacaccattgctggtgaagaaacagtgcataaggttgcttcacttttgcttgtatttctgggtggtagttatataattctgtttctgatgggaaagggtggccatagtcattcacacaaccaacccatggagaaaatggctgtagctggacttattctcgttcctgcattgtctccttgtgctacaacactcccggtctttcttgcagttggaaattcctcttccatgatggtgcttgccatcatagtactactattcaggtattaatcaatggcctatgattatttaaagtgacatgttatttgttggaaaacggtgtcagtgattatcaatattaaaaattctgatgttgaccttaacattgaataaagcaaaagctcccaagaaatcctatacttcatgatcatgaaaatttgttttgattattgagaaactaatcaaatacattctattcaatgttgttaaaagtggaccaaagagtgaaactaggtagggaatagggagattccataacttttctgaagttgtttgaccatctactcagttttgagagtgaattataatcagacaagtgacgaattcatggttagaccagttggccaggtagtatgagttttaagttgtaaatcacatgaaacaatatcaaatttataaaacctttcaggaaatgtgattacagattaaaccaggttgagtattttagttggtccaaaggtgtttgaccctcaattatgttttgagactgaattataattggacaagtgtccaattaaaggttaaactggttggactgcctagtctggtttctgtcaacaattactctatcacttgaacattttcctacagggtatggaaatacatggaatattaagttgttttaacatgacatcatgtataccttttttcatgacaacttatgctaaggcttctaataagacatcatgtctgacaaacctctctttggtaccacaaactacttgaattttgagatgccatccaagctgaaaaaagatggttaacaattcagctagatcccttgactacttttttgaaattcaggttggttgatggaacatataggaatccttatttctgtcttgtatttgaattttgaatgctgttctgcactaaaagattcacaatctttaaggccgagtttcttaatctggtttgatgctactctggtatagatgccaattaagtttgcaaataaaaattgtttagatattcattactaaccaagcttacacatattgcatttacagcacaataactgtgatgacttcgctagtagcattgtcattttatggggccagtcagctgaagtttcactgggtggagcgatatgacaagcttcttgttggatcagtgctgtgtttagtaggagtcttgaccctactttttcatgatcatgatcatgaagtagtttcgattggacagcactcacattcacataggaagattatttccatgtgagatatataaatgtttttgtaattacatgcttatgagcattatcacggtattgtttttattttgtatcagaagggaaaaagaaaaaagaaaaaagaaaaacaaatgttgctgcttaggagaactgatcatcttggtctagttaaagtggttgtatactgagttttcaatgtgaaattaatgtgtttttggtgtaaaaaaaatactttgattaaaaattaaaaatgaatcaccaacaaattattctatatcttgaccttttctttagaaatttaattgggatgatttttttccaaaaactttggtgtttttgaaaatttaaaagttgatatgataaattgagacgagcaattaattttaatttaaattgttttgaaaagagtagctagctattagtgtcctgtttcttttatgtattatatatcattcctaattgttagcttctcaatgactttaacattataacactttacatagttgtatttcattcaatttcttgttggtaagaatttttcatcacttaaaatcttatataatatgtttctcggaaatttttttagaatgttacatattgcataattattttaagtcaagtacgtttgattgtagagattttgagtgataagttataaaatatatgtatatttttatataagtaatactaattaatttttttaaatcattattaacggtatagcttcataccttactgtctttgaatttttttcattctcgttgtggtttgacatatacatgaatgtgtgagggtatgcaaaagagaaagaataattagatcatnnnnnnnnnnnnnnnnnnnnnnnnnnnnnnnnnnnnnnnnnnnnnnnnnnnnnnnnnnnnnnnnnnnnnnnnnnnnnnnnnnnnnnnnnnnnnnnnnnnnnnnnnnnnnnnnnnnnnnnnnnnnnnnnnnnnnnnnnnnnnnnnnnnnnnnnnnnnnnnnnnnnnnnnnnnnnnnnnnnnnnnnnnnnnnnnnnnnnnnnnnnnnnnnnnnnnnnnnnnnnnnnnnnnnnnnnnnnnnnnnnnnnnnnnnnnnnnnnnnnnnnnnnnnnnnnnnnnnnnnnnnnnnnnnnnnnnnnnnnnnnnnnnnnnnnnnnnnnnnnnnnnnnnnnnnnnnnnnnnnnnnnnnnnnnnnnnnnnnnnnnnnnnnnnnnnnnnnnnnnnnnnnnnnnnnnnnnnnnnnnnnnnnnnnnnnnnnnnnnnnnnnnnnnnnnnnnnnnnnnnnnnnnnnnnnnnnnnnnnnnnnnnnnnnnnnnnnnnnnnnnnnnnnnnnnnnnnnnnnnnnnnnnnnnnnnnnnnnnnnnnnnnnnnnnnnnnnnnnnnnnnnnnnnnnnnnnnnnnnnnnnnnnnnnnnnnnnnnnnnnnnnnnnnnnnnnnnnnnnnnnnnnnnnnnnnnnnnnnnnnnnnnnnnnnnnnnnnnnnnnnnnnnnnnnnnnnnnnnnnnnnnnnnnnnnnnnnnnnnnnnnnnnnnnnnnnnnnnnnnnnnnnnnnnnnnnnnnnnnnnnnnnnnnnnnnnnnnnnnnnnnnnnnnnnnnnnnnnnnnnnnnnnnnnnnnnnnnnnnnnnnnnnnnnnnnnnnnnnnnnnnnnnnnnnnnnnnnnnnnnnnnnnnnnnnnnnnnnnnnnnnnnnnnnnnnnnnnnnnnnnnnnnnnnnnnnnnnnnnnnnnnnnnnnnnnnnnnnnnnnnnnnnnnnnnnnnnnnnnnnnnnnnnnnnnnnnnnnnnnnnnnnnnnnnnnnnnnnnnnnnnnnnnnnnnnnnnnnnnnnnnnnnnnnnnnnnnnnnnnnnnnnnnnnnnnnnnnnnnnnnnnnnnnnnnnnnnnnnnnnnnnnnnnnnnnnnnnnnnnnnnnnnnnnnnnnnnnnnnnnnnnnnnnnnnnnnnnnnnnnnnnnnnnnnnnnnnnnnnnnnnnnnnnnnnnnnnnnnnnnnnnnnnnnnnnnnnnnnnnnnnnnnnnnnnnnnnnnnnnnnnnnnnnnnnnnnnnnnnnnnnnnnnnnnnnnnnnnnnnnnnnnnnnnnnnnnnnnnnnnnnnnnnnnnnnnnnnnnnnnnnnnnnnnnnnnnnnnnnnnnnnnnnnnnnnnnnnnnnnnnnnnnnnnnnnnnnnnnnnnnnnnnnnnnnnnnnnnnnnnnnnnnnnnnnnnnnnnnntgattatgtggcaaaatcttctttaaaatttagtgtaataaagtatttgattttttatttatataagtaaataaatggtctaccgaaaaaatattgtatgattttaatgtttgtaatagagttgaactctaatatttgtacaccaataaacgattcataataacgtaaaactttttgccaccattaaatgagattaaaacttctgcacaaatgaatcttatttatttcatcatataatgcatgttacgttttgcttgataatgaaacaaaaagacgctaaaatattggtcaagactattacaatgacaataataatacatctatagttaaatatattaaatggtgcgttaattaaagatgatttataattagatttaataatattattaaattaattatacgtactgattaattttactaaatttaatgtattttttaaatgtgtgacttgttatatgagtctatgatcattacaatacattattaataattattatagaattacataccaatatatttgtgtgtatacatattttgttcaatattattaatttatgtatttactaaatatgannnnnnnnnnnnnnnnnnnnnnnnnnnnnnnnnnnnnnnnnnnnnnnnnnnnnnnnnnnnnnnnnnnnnnnnnnnnnnnnnnnnnnnnnnnnnnnnnnnnnnnnnnnnnnnnnnnnnnnnnnnnnnnnnnnnnnnnnnnnnnnnnnnnnnnnnnnnnnnnnnnnnnnnnnnnnnnnnnnnnnnnnnnnnnnnnnnnnnnnnnnnnnnnnnnnnnnnnnnnnnnnnnnnnnnnnnnnnnnnntgtattgattgtgacacaattcataaatgagagcaacaccaaaaacaaataaaaatttacatttatgtttttctatataataataataatactaataataataataataataataataataatagagtgatttagtattactataggtatgatttaatttaatttaagtaattattaattacataaataataatttgtaaattgattcatgtagagattttttatgctttcaaaatcattctacatatattaataaaaaaaaaaccatattctgcatatgatttttaaaataattattaaagtttaaaattttttaattatatcacattatgattgaatcatcctctctcacacacataatatatattacactgattgaatcaaacatatatatatatatatatatatatgtgtgtgtgtgtgaattgaatcaaaattagagattttctttaatagggagactaaactcccgaaaaaaaaaatagatggaaaaaattcgtgaataagaaattaattaaagagataaaaattacaatttttaataaatagtatctaagagtacaaattttttctaatattaccagcatgacagtgttctcaaagtgttggccagagtttcttcgttcaatgacaccctccctctgaaggttttgtgaagatcaacacagatgacaactccagttttggattcattccccaataacattgcggccaatggattaaaggtttttgtggtatatataatatatgccttgttgtacaactaacttgtatgatcaattgtgttatggtaatttttcttggcccaaaccgaggacccaatggaacggaatcaactcaaacttttcatctatcctaaccacccgacaacaaagatatgagatattccgttatccggatatctcggcctcgaagataagatatcggccagaagatcacgggcctcaaccaaccaaggtccagatatatggaatgggtcaaataaagggaagcccaataagactcagtcaatccactatgctgaatgtcatacgtggttttaatcgtcccagacggagaacgtagaagcacctactagccgagaatctcggacaaggtcgtgggattggatcgtgggcaaaccttcattcaactaattctcaggtgatttactataaatacaagcaattcaaggagaaaatgtacacacaattctgactctctctttcatttacacatagcacacactgcacaccacttatgtagcgtattccttatgtgatattcttctttgaggtgcttcagcctcataagtatcttcatagagagagagcctgatcccatagtaatttcccaacaatcattattggacattctgttctcatcgagcagaataaattgtatggatttgcatgaatttcaccctcatcatgccctaattatctgctgcattcatgatttggcagccaaggactggaacattactttcaactttcaagcaaacctatagagaagtcaatcaatgtgctgcttcttcctcaactctttgccaagtttgggagacttatcagcctcagttaattagctttttcttctcttgctgctgctctaggcatctgatttgttatatagttgttttgttcttcttgctgtctttatttttattcactgatgaaataattaatttgatttaaaattctcttttttactatttattacatacttaaagaagtttaaattatctgaaatttaatatgtaagatttttaagataatatcacattatccagttgctaaattaattaatttacatatttataaaaattagttttttttataaaataacttgaaaatgataaaagatgaacacatcattgttttttatttataattatccatttatttattttctaaaatttattcatttctcactataattatgatttattatgagagtcaattataattttcatataaaagttttagcattaatgtaactataatagtagttttttattatttaaagtatgtattgttgggttgatgaatttttttcatgtaaaaaaaaagttgttatatttttttttacacattatcacttttagttttagttatcggtaaagaatatgctgacactatgcttgaagaatatggtgacatttactgtggtccaccatatttaaaagacgaatttagaattagcgatgtagaaaaagtaaatcatcaattaaaggcatgacctaaaaaggtcatcaagccaagaaactaatcacatgtccacattttctacactacacttttgtttttcttctcatgtgatgatgttccactttaccaccctaagcccagcttacctttttgcaaatgtttaatatcttataacttaatatatatgatatcattttaatattattcaattatagtatttttttttcttctaaattacacatttaatttttttatagctttatatatatgaaaatagcgtatgcacttttttcaaggtacgtaaaatagtatatgaaccagaagtgtaagaaatctttgtattataatttaatcacacacatggacttcgatgcttaaataattcaactataagatataagtgattgggatagaatgtctaatgatcttaacgtgtaactcatctttgatagttagattaagaaaaaataaatatgaagatattaaaattactcttgagtaattcttttcaaataatttagannnnnnnnnnnnnnnnnnnnnnnnnnnnnnnnnnnnnnnnnnnnnnnnnnnnnnnnnnnnnnnnnnnnnnnnnnnnnnnnnnnnnnnnnnnnnnnnnnnnnnnnnnnnnnnnnnnnnnnnnnnnnnnnnnnnnnnnnnnnnnnnnnnnnnnnnnnnnnnnnnnnnnnnnnnnnnnnnnnnnnnnnnnnnnnnnnnnnnnnnnnnnnnnnnnnnnnnnnnnnnnnnnnnnnnnnnnnnnnnnnnnnnnnnnnnnnnnnnnnnnnnnnnnnnnnnnnnnnnnnnnnnnnnnnnnnnnnnnnnnnnnnnnnnnnnnnnnnnnnnnnnnnnnnnnnnnnnnnnnnnnnnnnnnnnnnnnnnnnnnnnnnnnnnnnnnnnnnnnnnnnnnnnnnnnnnnnnnnnnnnnnnnnnnnnnnnnnnnnnnnnnnnnnnnnnnnnnnnnnnnnnnnnnnnnnnnnnnnnnnnnnnnnnnnnnnnnnnnnnnnnnnnnnnnnnnnnnnnnnnnnnnnnnnnnnnnnnnnnnnnnaagtcttacatcacttagaaataatagtaatgataatttataatcatcctccactttaattcattgagatgttttttaaatataaaaatgtaaaattgaatattaaactttaatgtactcactttctttttttagaagaataactcaacttaaagagaggtcacgaatagttgtttatgtaacaaactacattaaatttatgacttttgttattttgatttgtaatattatttttgtatttctattctttaatccttatatttgtgtgtgagagagaagtttttctctgcataacttactttattgagaatattaaacttcatcgaacacatttataagttttttgagattattaaccttcaactaacacatttttaactttgtttgtaattaaagctttgtatgtttttgttcaatcttttaaaaacgaataaataaataaacctgtatcagtttagacactctaacacacacactaactatacttttatactaacagatatgtataatagaatattattgaacttcaaccaatccacgtgtaacttcatttttaattcaagcttcgcaattttttatctcttcaatcttttaaacgaataaataaataaatgaacctgtaggaatttagacacttttttagatggaaaatgaaggatggaaaattagatgcctttgaaaagaaagctagtacaatttgctttcttgtgcattggtatattgaatattccaagcgcgtatttctcacacgctcaactttcgcagacactgggacccacgtggaggtgggcatcactgattcactgctgtgtttcttttgcatggaaccagctatgagtgaaaccattgcattattttctctctcttctctgaacattcccaaatcccatttctgtcaatgattctcttacatgggtcttcgctgaaatccaagttcatattttgcagctttagtacctgccaaattttccatctttttccaaattccaattttctttattagcggttcactgtgatctttgctttttgggttccccatttgttcctgctacataaactgttttttgggtttgatcccacttcttttttttttttggctaattactcaataaatatcctactttctattttggagctgggctatctatcccttccttgaaatttgtctcctttgtggtaaatttcattgctttctgcatctccacgcactcactcaatgtgtttctcattgggttttgaacattgtcttttggatttcaacttcaactttctttttggatagtggatgcttttgttctctttgattgttttcgagtttgagctggttttcccacttcaattgttggtgctgtttgcagtggtttcaataacattgttttcctcaccatatttctcagatcagatgcaatttttgtttgcttgtgtttccagatgaaagttgatggtgacattccaccagttctttagatgtcagtccattttcttaatgtgttacaaatacaatcatgtttctgtgtacctaaaaaagatactagtgatctgcattttttcttgtggcaattgttgctaagtttgttatgttaattcatttattgttcatttaatacatttggtgtttgatgaatttacagttagaacttcagtgaaggatttccataaagggaaagccaatttgagccagatttggaacaatgggggcctcaagctccaaaatggaggatgataaggcactactgcagctatgtcgcgaaaggaagaagtttgtgaggcaagcacttgatgggcgttgctcattagcagctgctcatgtttcatacattcaatcactgaaaaatacaggaacagctctgagaaagtttacagaacctgaaggaccaattgagccttctttgtacactaatgcaacaccagaacaaccacttgctttaactgaaaggaccctctcattctcttcagcatctgtgtcacatcacatagatgcagctgaacgtgaaaatttctctccaactccctcccctcctagttcttctagcaagttcagagcaaatcatatgaaacatagcactatttcttccaagaaagttgaggaaaaaccacctgtacctgttataggaatagtaacatcatcaggtactactacacagaataccagtgtaatctctggaacagcagcatttgaagattcttctcttccagctggaactccacagtgggatttctttggtctctttcaccccattgaccatcaattttcttttcaagatgggaagggtatgcatcaagatatagggcatgctgatgacatacaaagactaagggaggaggagggaattcctgagttggaagacgaagaagagaaggcttcatctcatggaagggaacactctagggactctgaagatgaatttgatgaagagcctgctacagaaactctagtccaaagatttgaaaatctaaatagatctaacagtcattttcaagccaatgttgaacctgccacaactaagcctctcagagggcattcagcttctgaagttgaattagtgaatggagaaaaggggacatctgcttatttatctccattaaagacagcacctatgccagctttgcctccacctgaaacaaataaaccaacggagaaggaaagtcgtaatgaaaataaagtcacccctaagaatttcttttcaagcgtgagagatattgaattgctctttattaaagcttcagaatctggccaagaggttccaaagatgcttgaagcaaacaaagttcactttcgtccaatattccaaggaaaagaaagtaatctttctggctctcttcttttcttttcatctggctttgaaacagttatcatctgggaatattaaatattagtaggtctaatgatgagattttgagtgnnnnnnnnnnnnnnnnnnnnnnnnnnnnnnnnnnnnnnnnnnnnnnnnnnnnnnnnnnnnnnnnnnnnnnnnnnnnnnnnnnnnnnnnnnnnnnnnnnnnnnnnnnnnnnnnnnnnnnnnnnnnnnnnnnnnnnnnnnnnnnnnnnnnnnnnnnnnnnnnnnnnnnnnnnnnnnnnnnnnnnnnnnnnnnnnnnnnnnnncatgctacttaagatacattacagacactcccagcatggatatccattaaattgcattatggtaaattttgttgatatccttggggtttgaaagaaaaattcactttctgtttcaaagaagcttttggaagtttcttttcattgctgtgaaattaatttcaaaataaaatgctttaaaattttaaccagagaatttttatttgtaacagatggttctctggtgtcctcgtttttgaaggtatgtttctcatgtggggaggacccaagccaagttccagaaggtaatttgagtcatttcaactgtttatctttcatttttcccagacatttctgaccttgttgggttgaaccaatcttcttgttagttctgaaaatgaaagtactctctaagtgtacacattttccctcagtaggactgtaggagtgatgcgaattgcaaatcctattattaaatatgactacagctagtgttgatcaagaaattgttgaatgtttgggattctgtggtgcagagaatctggagaatttgtttacttgagaagatgtatttggtgttatttgtttcctacttagtttaaaattcattttgagttactgcaacagagtaataagcattctcttgtctgcctttaaaagtgaaactcatttcagaagataagattaatattagaccatctgagtaaatttcccgtctaattttttggtaatttagatatccatgcctgtgtttcggctgttttttgaattcaacgttaactattcaattcatcttcttagaacctgctcaaaactcggataagtacttaacttggcataggacggtgtcatctcgatcctcctcatcccgaaaccctttaggagcaaactcaattgacaatgctgaggaccatgcaaataatctctttgataattcttgtatgatctccggaagtcatgcatcaaccttggataggctatatgcttgggaaaggaaactctatgatgaagtgaaggtacgatgtatttcttatcaacatatttgtcaacctgtattttctgtatgttactttttgataataaaatgttgcacaactcttgtattggattcggatcttagactaaaccctgaagttttatgtttacaattatatttttttaataaattggtacatgtaatagaatatggctatttctctgtctgtttgctaatatcattgttcacttctgcgagtaggctagtgagattgtcagaaaggaatatgacatgaagtgtaaattcttaaggcaactggaatcaaaaggagaaaaggcctctacagttgataaaactcgtgctaaagtcaaggatctgcactcaagaatcagagttgcaattcataggataaactctatatcaaagaggattgcggagatacgagacaaagagcttcaaccacaacttgaggagttgattgaagggtatgctcctgtcagttttgctatttttatgaagtatctatttcatgccaatgtgtactgccttgataataatacatatacaagcatgggataaaaggtgcatcaagaagtgcgcaatcaggaaattccataagaagaaagtttatttatcaggaagtttatttttggtacaacttgctaaaattgattaagttctttatttggtaaaagttttccactgaaggttataaatttactgaacaacgaagtaatagtcaataataaaaaagctcagttgctgctgaaatttattgttttgcttttgttctataccaaccttgctgaaatgtattgtttctgcatctgaaacctagagttttctactagaagagtctaggtatcaaaaaccttttgtctaaattaggagtaacattatcgtcaaatgcaattgacagttttccaaattatagtattaagtgttaacttttagtaatcgattatgcaagattgatggctttctattgtgtgactgatgttgtgcgatcaacctttgaatgctatttttttgatcttggaatagtaagcaacatatgttttcatagtcagagggatggatggttaacacatcaacttatgttaattgatatgatcttctagcttttgtatttcatctgtttctgttatactttgatgtcaggttgaatcggatgtgggaaatgatgcatgaatgccacaaacttcagtttcagataatgtcggcagcatataacaacagccatgctaggatcaccatgcattcagaattacgtagacagattacttcctatcttgaaaatgaactccaacttctatcatcaagctttaccaagtggattagagctcagaaattctatctggaggctataaatggatggcttcacaaatgtgttcgtcatgtagaaaaatcatccaagagaaaaaggaggcatcaatctgatcttagctattatgatcctccaatatatgtcacctgtgctgtctggttgaataaacttagtgccttacctgtaaaggatgttgccgattcgattaagagtttggcaacggatactgcccagttcttaccacaccaagacaagaaccaaggaaaaggtgctcatcctcatatgtcaacatggaagcctgatattggtggcgaatcagcagatggtttattgagagatgacacatcagaggactgggttacaggtcttgaccaatttcgacgaagcttgattcgatttcttagtcaattaaataatttgtctggttgttctgtcaaaatgtacacagaacttcgacaagccattcaggaagtcaaaaattaccagcgtttgaattctcagtctcaaaatgatcatttgaattctcagtctcaagatggtcatccgaattccgaatctcaaagttgatccatcagagttacaatctcaagtggtttaggctgaaaacaaacatccacacgataagagaattgctatgaaacattgtggaattgcagaaatatagcattgtgttgagcatactagtccacaggatggagcatttgtacatggcaagatgtaataaagtcattacggattgccacacttatttgttcatttagtcccaagaatagaagggatctgatagattgcactagagagattatgagtgcatgattaaggactcagtaagagctgtaagtactaggttctgatggtgaagaaatttgggtgcaattattttgctaataaagggtttgtaccagtacttgtacttctccttgattttctttgcttgtgtcattttttcatttacgttatgtgtatataattattgattaataatattatttgaattttgtaaaggaacactcaaatggctgagagctcgtttagttaggaagactgaatgtctaattttagtattattagaccaatttttatagttttaaaaacaagtgattttgatttaaaataatctagtgattttttttatagagattttttataaaaaaaaaaaaaaaannnnnnnnnnnnnnnnnnnnnnnnnnnnnnnnnnnnnnnnnnnnnnnnnnnnnnnnnnnnnnnnnnnnnnnnnnnnnnnnnnnnnnnnnnnnnnnnnnnnnnnnnnnnnnnnnnnnnnnnnnnnnnnnnnnnnnnnnnnnnnnnnnnnnnnnnnnnnnnnnnnnnnnnnnnnnnnnnnnnnnnnnnnnnnnnnnnnnnnnnnnnnnnnnnnnnnnnnnnnnnnnnnnnnnnnnnnnnnnnnnnnnnnnnnnnnnnnnnnnnnnnnnnnnnnnnnnnnnnnnnnnnnnnnnnnnnnnnnnnnnnnnnnnnnnnnnnnnnnnnnnnnnnnnnnnnnnnnnnnnnnnnnnnnnnnnnnnnnnnnnnnnnnnnnnnnnnnnnnnnnnnnnnnnnnnnnnnnnnnnnnnnnnnnnnnnnnnnnnnnnnnnnnnnnnnnnnnnnnnnnnnnnnnnnnnnnnnnnnnnnnnnnnnnnnnnnnnnnnnnnnnnnnnnnnnnnnnnnnnnnnnnnnnnnnnnnnnnnnnnnnnnnnnnnnnnnnnnnnnnnnnnnnnnnnnnnnnnnnnnnnnnnnnnnnnnnnnnnnnnnnnnnnnnnnnnnnnnnnnnnnnnnnnnnnnnnnnnnnnnnnnnnnnnnnnnnnnnnnnnnnnnnnnnnnnnnnnnnnnnnnnnnnnnnnnnnnnnnnnnnnnnnnnnnnnnnnnnnnnnnnnnnnnnnnnnnnnnnnnnnnnnnnnnnnnnnnnnnnnnnnnnnnnnnnnnnnnnnnnnnnnnnnnnnnnnnnnnnnnnnnnnnnnnnnnnnnnnnnnnnnnnnnnnnnnnnnnnnnnnnnnnnnnnnnnnnnnnnnnnnnnnnnnnnnnnnnnnnnnnnnnnnnnnnnnnnnnnnnnnnnnnnnnnnnnnnnnnnnnnnnnnnnnnnnnnnnnnnnnnnnnnnnnnnnnnnnnnnnnnnnnnnnnnnnnnnnnnnnnnnnnnnnnnnnnnnnnnnnnnnnnnnnnnnnnnnnnnnnnnnnnnnnnnnnnnnnnnnnnnnnnnnnnnnnnnnnnnnnnnnnnnnnnnnnnnnnnnnnnnnnnnnnnnnnnnnnnnnnnnnnnnnnnnnnnnnnnnnnnnnnnnnnnnnnnnnnnnnnnnnnnnnnnnnnnnnnnnnnnnnnnnnnnnnnnnnnnnnnnnnnnnnnnnnnnnnnnnnnnnnnnnnnnnnnnnnnnnnnnnnnnnnnnnnnnnnnnnnnnnnnnnnnnnnnnnnnnnnnnnnnnnnnnnnnnnnnnnnnnnnnnnnnnnnnnnnnnnnnnnnnnnnnnnnnnnnnnnnnnnnnnnnnnnnnnnnnnnnnnnnnnnnnnnnnnnnnnnnnnnnnnnnnnnnnnnnnnnnnnnnnnnnnnnnnnnnnnnnnnnnnnnnnnnnnnnnnnnnnnnnnnnnnnnnnnnnnnnnnnnnnnnnnnnnnnnnnnnnnnnnnnnnnnnnnnnnnnnnnnnnnnnnnnnnnnnnnnnnnnnnnnnnnnnnnnnnnnnnnnnnnnnnnnnnnnnnnnnnnnnnnnnnnnnnnnnnnnnnnnnnnnnnnnnnnnnnnnnnnnnnnnnnnnnnnnnnnnnnnnnnnnnnnnnnnnnnnnnnnnnnnnnnnnnnnnnnnnnnnnnnnnnnnnnnnnnnnnnnnnnnnnnnnnnnnnnnnnnnnnnnnnnnnnnnnnnnnnnnnnnnnnnnnnnnnnnnnnnnnnnnnnnnnnnnnnnnnnnnnnnnnnnnnnnnnnnnnnnnnnnnnnnnnnnnnnnnnnnnnnnnnnnnnnnnnnnnnnnnnnnnnnnnnnnnnnnnnnnnnnnnnnnnnnnnnnnnnnnnnnnnnnnnnnnnnnnnnnnnnnnnnnnnnnnnnnnnnnnnnnnnnnnnnnnnnnnnnnnnnnnnnnnnnnnnnnnnnnnnnnnnnnnnnnnnnnnnnnnnnnnnnnnnnnnnnnnnnnnnnnnnnnnnnnnnnnnnnnnnnnnnnnnnnnnnnnnnnnnnnnnnnnnnnnnnnnnnnnnnnnnnnnnnnnnnnnnnnnnnnnnnnnnnnnnnnnnnnnnnnnnnnnnnnnnnnnnnnnnnnnnnnnnnnnnaaatgcaataaaagaaagaaagaaaatttcgagagagaaaaaagtcaggttacttttccctttaattgaatctaatcgaatagaattacctttttggaagaaaaaaaatattaaaaatacgaatgcatatgacttatgaataaaaaatacttcaatttttcattaaaaaaatgtatattaccattttttgttcttttcgaatcataaataactgttattagcaagtagcatggttgataacctactctactttgaaaattggttaagaaaagaaaattgtcacataaaaaattagaaagaaaacaaacaaaatatgtgatgtttatattgaatagaatagagtaacaacatattatatagcacattcttactagcacaatgtttactatgtagtattaattaaaacttattagaaattacaaaattatgaataagactcacataattatattatttttaataacttttagtcaataataaaaagtttattgtctttttacagcataaaaaatttattgttagtaataaactatttgataaattttattcataacatgttaatgttttggtaaattttattaaataaaagatattaaaaaatgtgttagaaaatacatttccaaccaccatcttgcttgaaacaaggttttatacagtagttgtttcatttggtgggtacgaccaagatacggtttcttatttagagaccaccaaaccaatcaacaagaattcacattcaggaatgaacgatgaaattacttactttattattcaataaaaatcatatgcacaaaaccaaatcaaatcccaagatacatggcgcacgcgtatcagtaaatgtgctacaatgtaacattaatgtatacgaaaatttgtataatctcgaatatttcggtcctatctatgaacgaagaaaaaaaaaaccctttgctctcagcggcttttttcaccaaagatccacgccataattacaacgtttagaaacaattttggcctgcgccgttaactcattcaccgtcacatcacagttcaccttaacggtaatcttccacgtcttaacggaccccacttttattttcaccggtgccctaatcctaacggtcaacggcactctccgtttggtctgcgcctccagcaacgcgcttaggtcctcgctcctcaggtcgattccgtcaccccttaacgccgtcccaaacaccgtcacgttgtttgacggctggtaaaacgccggcagagcgccgttacacagcctcgcgtccttataaaacacgccggcggagctatccttcaagtaatggatcccgatcttgtcgttagggttatcggccttgacggtgacgttgaactccggcgagatcgcggccgcggaggacggtgaggtgaggttaattcctctgacggcgatgttttcgatggagtatttcggcgcctcgggacggaaaacgaggtagatgacgccggcggcgatggcgaggagcacgacgagaatgaagaggattccgatgagccagcagaagcagcagcagcatcggctccggtggtgtttacggcgagcgtattggtcgtagcggcgagcgttctccggcggagggacgcggtagacttggtccttcgggatcttgatgacgtaggttccaggcggaggcactggcttctccgatgacggtggagacggcggtttcggaacgacggaggagtcttgaggcgatgccggttgtgaatcggcggaaacggaaggcgagtggctggggtgaactcggtcagccattgagtgagtcagtaacgagtgaagaagctatctgaaaattgaagtgaaatgaaattgtaaaattcgaagctagaagagtgagtgaatcacaacgttattctattcattttatataacaagcaaacggcttacgcgttggaatgtaatagtcacgcggtttaagaattctactaatatattttaggcagttagcatttgtcatatatgaaaatttaatctaaattactattggataataaaaaaagaatagatattaataatattttatttcaaacaattagtaagtcaaatttgattttttcttttaagaaaataatcttgtaattatttttatttgtttagatattaattaaaagtttaaaaataaagttaactaaaagattaaatttataatttataatgctagtataatttttaaaaaatattaagggacttttcaaaattaaattaagtcaaagttttttattggtaacttcaaaaagcttttttattagatggtagtagtcaaaaagaacacaccctatcaacaaatgctgcattgcacgttggaatcattgttgtttgttagtaattaattatatatgactcacacttacccatatggaacattttttaaatctcccaaaattaattaattagaactttgagccgtgactatgaaattagttaggatcatagatagaagagataaaacttaaaagacaacgaaactatcaaaacaagtgcatgaaaaccataagaaaggattataacttataagtgattatttgaagaaggatatgataatttaatatataaatataaattaggtaaatgttaaatagtgaaactgatttagaaattaaaaaggagaatttttattattaaaatacacaaaattaaaattaaattgtttataattttttatactcttttataatttctacaatattttttaaaattaatattctaaagatactgattattaaaatcctatacagtaatataataactaataaacataggagggaaaatggagtacagttcaatgtgagatcactcacggttggcaagtttagaaaaaaacacacgaaagcaaagaaagaaaaatgaatgggtcaaaggagtgtttggatgcaccatttggaattttggattggcgtgtatctaattttgatgtaaacacacggtatgctaattgttgccgattcgttttgtctacgagttagttggcgctttgccacacgcggttttgtttcttatggactggcctcaacccttcaatgctttcctttttgtataagcatttgtctttgcaccaaattagtacgctttatgaatgtaatcttttttcgtttataaaatggatatccaattaatggcttttacctaatattttttttttcctttaacttgaaatggtctcatgggtcaatacttaacaagaaaaatatacaacttgctcttctaaaagtgtttgttgcaataaatttgtttgcttttctgcttcttgtgcaaccgacaaagttttatcaaaacttgtataataattaatttgattataattaaaaaataatcatttacatcataattaattcaattactaataaaaattataacgtgtatattaaataaactcaaataaactccaattaaaaagttaatttgtattataattaatttgattatagtaaaatatttttttattgtaactaatttgatttcaattaaaaagctaatttgtatgataattagttcaatattaaaaatnnnnnnnnnnnnnnnnnnnnnnnnnnnnnnnnnnnnnnnnnnnnnnnnnnnnnnnnnnnnnnnnnnnnnnnnnnnnnnnnnnnnnnnnnnnnnnnnnnnnnnnnnnnnnnnnnnnnnnnnnnnnnnnnnnnnnnnnnnnnnnnnnnnnnnnnnnnnnnnnnnnnnnnnnnnnnnnnnnnnnnnnnnnnnnnnnnnnnnnnnnnnnnnnnnnnnnnnnnnnnnnnnnnnnnnnnnnnnnnnnnnnnnnnnnnnnnnnnnnnnnnnnnnnnnnnnnnnnnnnnnnnnnnnnnnnnnnnnnnnnnnnnnnnnnnnnnnnnnnnnnnnnnnnnnnnnnnnnnnnaacttgtattttgaattaattagaaaaagaaaatttgtttctattatgtagtggattgacaagagtgggtcaatctataatatacaatatttatttgtaaaaaattaacacattaccaatttatttttgttgagtatttgtttcacatatataacacaaactaaacaagtttttgtggtgtatatgttccacatacattataaaaataagattaaaatatattttttgtccatataaatattgaaataattaaaatttgtttttggaaaattttgaatatgtttttcatcctcacaaaatgtaaatatgtaatattttggctcggaaatggaattgggagatctaatcctaggtgtcaatgtcaagtcctcgtaagtgagtcaacatgttaactgaaacttgtcatgtgtcaattagaacttggtgtgttgatccactaacaaggacctgacgttgacatatagaataagatctcttgaatttagttctgaaccaaaatatcacacatttatattttgcgaaaaagaaaaacatattcaaaattttatagaaacgaattttgaacatttcatgttaatagaaacaaaaaacatactttaacctaaaaacaaattttcgttagagtatacaatgaaaagttgtttctatcaacagtatttgtgaaaaaatacaaaaacttgggggtgtaaacttaggattaggattgagaataacaggggccgtgattgaatgcttaatcttagtgttggcaagcacaccggaccactattagcacatgttattcccacactcattttcgtcattaccacacctccatcacaaatatttactccttacatcttaaactaaatgtcatgctaaattataattattatacacagacaaaaaaaaagttaattaatcaaataataataattttacaaaattaaccttattaagtacttcctcctttgtaaaatatgtaccacatttgaaaaaaaaaattgtatcaaaacaagtgtcactttaagttttgaatgtaatattaattattttttcactaatactcataatactactctttttcatctattaaatataaattagttttgtaaaattattttattttattttttcatctatttattaatttttcttggttaatttgtttaaaacaatctaggaaagagaatgatattagttttatgttgaaaaactaaagtaacacttattaagggtataggtgaaaaaataatattacattgaaaaacaatttatattacattgaaaactaaagtaatataatacttattttgcgatattttttattcaaatatgacacttattttgggataaagagtatatttattagaaaatttaattatgatataatttatggtaaatattaactagtaccctaaggatattggttaagaaacttaaagtaaaaatatttttattagaagtcggaaaattgagttgttcataatcttttatgcttttttatgatttacataataaatattttttattttagtttcttaattaatgttctaatgagattggttagcatgatttatatattaaaagctatttatttattataaattttaattatataaaaagtaaatattttttaccttatacactgtacatactaaacactagtttataatatttaaaaatggtgaaaataataaataataatctttaaataatttctataaaataacagttaaaattatgaaaaaattaaataaactatataataaaatccaaaccaattagaatctcaattattaattttctaattaataattattattgcatgaacatgtaaattaattgacacgagattactcttagcttaatcaaaaaaatttatcacctatagtaatttcacaagactcaaatagaattacttctcattgaggatacgtgtcatctatatcaaaaagtaattttcttccttacataggaacaaaatccaaattaccaatgaaaagtcaactaaatcctaactatgcctgccattacaatttgccaaatataaatccttcttgcacctatataacaccacatccaccattggtctcatcacagaggggagaatcacaactacatgcagaaggaaaaaattaaaaaaaaataaatcatggaagctcaagctctactcgccctcactcgtctaagcatctatgcctcaggcatgcaagcacattctctttcccctctctttatcatttgctattatataccaattatatatacaactagatcacaaaatcttgttttattcttcaccaacaaaatgttgtatacacatacatgttacatatcacaggtgcacacagtcaaattcacattcacaaacaattgtgcattcacagcgtggcctggaaccttaactgctgcaggaaaaccacagttatcatcaacaggctttgaacttccatccaagtcttcattttccttggatgccccagatgggtggtctggtagattttggggaagaactcactgctccaaggacccttcagggaaattcacatgtgggagtgcagattgtgggtctggtgaaatccatgcaatggtgcaggtgcaactccaccagcatctctgatggaactcagactagcctcaggtacacgttctctaaccattttttttaatctgtggcaatcgaagacagatatcgggggtttaacaactcacacactcagttcaaccgagttaaacctctccgtcgttctctaacctttctatgactattattatttgttatgaacatgctatcattgatcagcatcatttgttattaattttccatcatcagatgctagtggccaagatttctatgacacaagcctcgttgatgggcttaatttgcctctctcattgactccacaaggggttctgggttgtgcaacactactagttgcccttctgatgtgaatgcagcatgtccaccaggtttggctgtgaaaagtgattatggaagtgtcactgcttgcaagagtgcatgcatggccttcaacatgccacagtattgttgcactggtgattttggtagccatcagagttgcaagcctagtgagtattcgaaagtgttcaaggggaagtgtccttgatcagtcttatagctatgcttttgatgataaaaccagcactttccaatgttctgggaggcctgactatgtcatcactttttgtccatgattctataaattaattagctagttggttctacctgcttttagtataaggaagtgttcagataatcagatgtgtttatgtatggcttgagagaaattgcaaattcaaaaggctaaacaattgtaccaaaagtatgcaaatacttatgaaatttattatttccttcattagattcaattatctaactaatttatgaagattaagaaaaataattagtttagttaacaataaatttatcttaaattcgtaactttctagaattatccttgtaattcatatttatcttttctaatcgttgtcaatacattatcaatctctcttttgtaaattaggggtatttgtattctaaaataattaatgcaagaaatattataaattaaatcttataaaaagaaacaaacttcattttaaatttagatattagatattataaataggaacaaaaaaagtactaaaatattaaaatttatgttgtttaattacttttttagtttggagcatataatttgttttaattacttttaatatcacaaaggaaaaatataaataaaatatattttttgttctcataaaattgataatgtatgtttttttgtccctgcaaaaattttaatttattttttcattttttaaaaattgaaatatattatttttttgcttagagtaggtnnnnnnnnnnnnnnnnnnnnnnnnnnnnnnnnnnnnnnnnnnnnnnnnnnnnnnnnnnnnnnnnnnnnnnnnnnnnnnnnnnnnnnnnnnnnnnnnnnnnnnnnnnnnnnnnnnnnnnnnnnnnnnnnnnnnnnnnnnnnnnnnnnnnnnnnnnnnnnnnnnnnnnnnnnnnnnnnnnnnnnnnnnnnnnnnnnnnnnnnnnnnnnnnnnnnnnnnnnnnnnnntaatttccacatctcgaaaaaaaactactttttaattatcactgttcactggtttcaaaattttatatttgtagtattttagtatgagtaatgtacaataagataaatatttatttttatatagttaaaattataatcaataaatattttttaattataaattatattataattaagatttgtaataaatgaatattttttaaatgtgtaaaatatatattaaatttatgataaataatatatattttgatataattattttaaatattgaaaattattataaaaatattataagttcaattttaaaataaagatgataatgataaattgaaaaaataagcaattaaaaaaatcaagatatatataaaaataagacgataataatttgagatggtcaattaaaattaagtatatttaaaaggaataaaaattaaaactaaattaaatattcaatatatgtgagattgggataatatacgagacagagagataataattcttaaaaacactttcatataagaaaaatcctctcattgaagaattgctcttcaaaatactcattctagatgagaattcaaatttataatgaatggaatgagtatactgtaatctttttacatcattaaaattttcctaattcaagaaagttaaattcccaacccccatgggaacaattttataacaatatacgtcaaaaaaattcttggaaaacaatattttgaggttcttttataattatatatcaagcatgataaactaacgtccctaaacttcagattgctggaaactaaaaatttccaataccaatcacctaccaaggttgttacaatgtacatgtaccaacctgtttaaatcaatttcaaagcatgaaaggaagagaaataggcaataaaagatgcaatgggtttggatcatagcattattccattgattgcagcgatggcaaaaagaacgtcaagcaatatcaattattacactgaacaatactgcaaaattcatgaatatacaacctgcccattgaagggttgaaaagaatgaatgtcctttgacaaagaatttcatttcatatcctgacttgttaatttgttataatgcctgtggagagctgtcatcaagggaccaaaattcaacaaacttgaaaagaaacttaaacaaaaaacaactatagatgatgatgatgttagtggttaaggctatatgatatgatcagcaactctaccttattgttgagagatcaccaaagacagttttcatgtcaggcctatcagatgctggaagcatgcatctaagagccacctttagcatttcatcaagaattttagattgtctttccccattgtgcttgtccattatagacctatcaaagcactggtttgaacggtcttgttcggctaagaacctcacccagtcagtgagatcaaccacccctggaatcccagaaactatttctccagaatttcttcctgttaggagctctaacaagaccactccaaatgcatagacatcacttgtcagggaagggcatggtttgcttgatctagaaaactcaggaggtcgataaccgagtgcgccagcattcagaacttgctcagcagtaccagcagcagtgagtattctgtgcaggctgtagtcagtgaggaggacatttctgttgggagtttctagcaaaatgtttgtggatttgagatttccatgaggtatggctttctcatcgtgtaagaaatgcagacatcgcgccacctctacagccaccctgagcctttcatcaacaggcaaaggatggagatttcttttatctgtctctgcagaaaaatttgaaacaactaaataaaacagaagtattacaatttacaaccaaaagtctaggtgttatgctgcaatcaaacatgcatgaggccataatcttaccatggagatataagtccaaagattgtgcattcatataatttgatataatcagtttctcatgttcctttggccccaagtagtaaccttgaacagaaaccagatttggatgcttgatagtcccaagtttctttatttcccttgccaactccttttttcctttagttattccttctcttaaccatttgacagccaattcatgaccagagtcaagtgtagctttgtagagtgttccatgacagctcctgccaataacttctgctggagcacatgaaagttcttccgcagttagcaccaaggatccatcaaatatatgcaagtctccaaccagtttatctggagaggagactttgagtgaaccaggattctcaaactgatagctttttgaagatgaaggatttgaaggtgacaaaatagacattggggtagatgttccttcctcgttcttacctaattcaaaagggccaggatctattggcttctttcccactggatgaatgtttattgcatcatcagaagaccccctttgagcaggtggtaatgtttccaaatttctatacggtgcctctgtatttgaggtgaaagtactctcttgggtggtgctccttgcttcattttgtttagaagtcctttctttttcatgatggaccttataataaattattatagccacaaaagccatcacaaaaccaccagcaaccaaacatgcaatcagggcaatcctagttgcagactttttatgtaaccgatgttccctcaaacctaggttggaagtatcttttggtgatgattgtgaacgtggaaataccagcatagtatttcctggatgaaatgctgagtcaggaaactgctttaagctttctggcacaacaccagaaagattattaaaggacacattcaatactctcaactcatctggaaggtcatcaggaatagtaccttccaattggttattgcatagattgagatatgacaaattgtgaagcctactcatatttaaaggaagagtcccactcaagttgttgtgtgaaagatcaagaaacaccagactaaaattttcagcagaaactaatggattatttggaggttgaaactgaataggaattgatccagaaaatttattgttggagagattaagattaatcaatttggttgaggtaaaaaagcttggtaggacgaacccagaaagctggttgaggctaagatcaatctcttctagttctggatatgttcccaaaattggtgggagaaatccctccaatgagttattggataccttaagtgcagttaaccttaaaaattgagaagtttcatttggtagcattcctcccaatgagttggcacttagctgaacaacttccacatagttaccccaataccggatccttgagaaattacctgatagtgtgttgttactcaaatctatgatggaacagtggcctaccctgagaggtaaggggccatacaacttgtttgaagataaattaagcttccgcagagtcaccgaggtaataattccaatgggacctacgaagaaagtttaaattgtaaaagaggaaaagggtaagcagaaactcattgaataacactttgaactcatgtcatgtgtgattttatgatattatgactaaaattgatgaataagtcaatgctaaacaattgggtatagacaaagggaacaaagtataccaagatttctacatgcagaatagattgtttgtcacatgtagcatacttttggacagattttggaattacttcccagctcccacaatgttagtacatagaaaactaaatggcttctataaggattaacggatgaatacataaaaatggtataccctggacaccaacttcattgcggatataggttaccacataagaattttctgcaaagatctaaaggtctgctaatagttgcatacctggttgtatactatccaaaagatcccctcaagagggtttaacatcaactacttttcttccttttcaaattttgcatctcaaactgactccataaatcaatatattggactgatgctgattatatgcaaccaaaatactaacgttaagtttttaatatactatgtattttataaggttacattagttttttagttccctaatttattttttagattcaatttagtcttttaattttttctgggtttaatttagtcctctaattttttaaattaattcaatttgatccttcagtctaaattgtaagaaatcacactttgtgacggttcaaaaccaccactaagtggttttaaaccaccacaaaatgcacattttccaaaaaaaaatgaattggttttaaaaattagaagaccaaattgaacaaaaaaaaaactagaggaccaaattgaatcaattttaaaaattagaggaccaaattgaacctaaataataaattagaggactaaaaaactaatttaatctattttataattaatgcaggcttccttagtacttatttggcatacagaattatgtttgaagtacaatttatccaacaataggttgaaccatggaacagaaacttcaaattggacaaatataaaattttctttaatttgagttctccactatttcatatacaggtaagaaatttatgaaataatttgtatttcagccaatattgatcactaatagactttcatttcagtttggtcaccatgttgtactttcctctacaatctttgttactagaaatgattgagggtgtgaaaagtatttatttattccacagaagaaaattccccaaagggtttatctaaaataactaaaatagcagaacagggaatcagaaagaaagttgcagtttcatatttcagcaaccaaacagcagcttgatatgggtttttggcagtagtttttcatagctaaaacttcatttatgaaggttagcagaacggacagcaacaaatggggagtagactagcaatttcaattgcattttgagtttagatacatttatatagaaaatggataagttttaactttgaaggaagaatatcattacaattttcacagaaaacatagaagataccttcaagcttgttttgactaagatccagttcagacaacatcattgaactttccttcaatagagcttcgggcagtaaaccagtcaactggttgcatgcaaggcgaagaatccgaagggataccacaaacttgaaggaaggtatattaccctctaactgattattactagcatcaaagacctctaaattgtcaaggtatggcataccatcatgagcaaataactcaccattcaaggaattatggctaatatttaaatactgaattgaagagagaaatgactcatctgcaagtcccaaatccggtgtaccagaaaacctgttgctgcttaagtcaatatatagcacactgcccatctgataaaatatatgcataatatccccagagaacttattcatgtgcaaatctaaatacttcaactgctcaagtttgtgaaactcaataggaagagtacctccaagttcatttgaagaaagattcagatatattaacttgcgcaactgagtgaagttagagagtaacgggccattaaacttgttgagggacaaatcaacatattcaagtgattcaattgtagcaatatgtaagagatctcctgtgaactggttgttcacagcggacaaattgcgaagcattgtaaggccactaattgcaagcaaattaaactcaccaaccaaaccagcattgtccagagtgattgatataacactgccttcactacacactatcccatgccagttcttaggacaaccatcggaatctaaagacctggaatcccaagaattaactactaatccagaagggtcattctgaatactcttcttgaattcaaggagtgaatcaatatctgaattccccaatgcaatagccaccaacaacaatagcatgaacaagatagcctgcatgcctttcctagtagctcctaatccaagcatcaactaaatacaaatgattatatgagggaaagcaacacaatggaagtgagagcaaaggggcaagccgcaagtgtacaacaaaaaattaaaggcaagagagtaattttagagcaagttattcaaacaatgatgcattcttacctcttaattcacaagaagtaaagttgagtaatgaagcatgtacgcgtagcaactgaagtaacaatgctaaccaaagcaagtagaagaacaaattcagaaggaacaagggaaccccagtacgtttctgctgttagaaaacgaatggttctgagaagatgaggtcataaatctgaacaaggggctgagtagggtggaatgcagtgtggcaagcaaatgattaggggaaagttttgattttgagagaagactagtagcacaatagtgtcatagaacaagaagaagactgaggagacattaactgagaacatggtaggtaggttgctgttttatcatgtcatgattaacaaaatcatatacagattaaattcatctaaattattttatagataatatcgataatcatatagcagaatgatgtgttgatcctatttttcttttttatagcatctcttttaattattatctctttttcttcacattttctttccttatatatatcttaagtactatataatatattaacttaaaaacaggtgctatataatatatcacttcacttcttatatcacacttttcaataaatattaatatttttttgacagagactatttcgttctaatatagtaaacaaattaatatatcacttaactaacattatgaaagtgaattcagaaagaaagaaaaatagaagagaaaagtgatgtttacttgatgttaaagaactccaataatttttaatttttaagggaaaaaagaaaaggtttgtgagagagacttttcaagtcgacgtcactggattgtccccagatacaaagcaactgtatatgacctcgttggcagcacctttgactttaagggttagtttggttctgcctccgaaccttcgcattaatgcaaaaattcatctaaaattttatagataacgcataagtaatttttagttgtgcgacacaagtccaaacacacggaaacttttatttaaccacatctttctattttttactgtcttccatttctaaggatccaatgcaaaagcgcgtcctgtcattttcaaccttaagcatttagtgtgtatttaatttgacattgatgaattgattataaatttataattgatccttaatttatttaatgtaactttaaataatttttacattaaatttaaaattttatattaaattttactcctaacttaattttataataaaatatttaaatatattatctcacttcaaaatcaattctacaaaatcatgttaatgtttatccaaacaactcttaattttatgaatctaaatgaatgaattgagatattagtaaaatctttaatatgtttttttaaataaataaataattaaaacttgagattgaattaaaaaatatgtttaatctaaaagtttcaagagaaacttaaaaaaacctaggtgaaacattactttactttctgagacaataagtaataaataattattcaaataatttcagagaaatattaattgaagttatatttggataaactctttcataagtatttatacgttgaagactctctaatgatgtttgggagttgggatccttaattgagaatgtagaagtattgtttctcataatcaaatatttgttgtaggttttgtgaagagaaaagctaataaatttgttcatgagttagcaagagtgaatgagtgactctatctttatctagctatacttttaattgtataattcctttagttgaacatttactttataatgaaataatataaatatgttttagtaaaaaaaattataaattgaaaatgaattaagtttatcgcataaactaaaattaagttatatatttttttataaatgttcttttcatgagcaatctatctctcattggaccatacacatacgagcattcatgaaaagatcttgaaaagatgcctaattaaatgctataaacattattgccagtgaagcaacaacttcaagaactgaagaatgttgagcatgagctcccactcgaagtatccaagactgaagaggagcaggacaagctgaattttttgacattagaacaggaccttgaagaggcgtgacttctttcaaggttaagattagttattcattataatcattagattttaagaaaatgaattatgaggatgagaagtaactcttgaagtgtaagttaatctctcttcatctctctctatatatatttatcgtgtaactgaacatgtgtaatactctttttcagtctccagcagattaagattggaggatttgttgaaagtttgtggaaaaggcaatgcagaaaggtgatcacacttgacctaaacttggtcaatcttttgtaccactctagctttaatgactttagagaaaactatttgattaagcctacccctaaatttgtgtgtatgtgcagggtatgggatgaactttgcaggaccaaatatggagagagctcctctgggaaaggaaaaagctccaattccaaaactgaaccttttgggactggatagagctcctagcatcaatctgagtcatctgggaacacaagttataaactggaatacaagtatcttttgaattaaataaaaattatggcaagtaattagtaattactacaatgatagttagagtagtttgaaacaaacttgtcatactgctgcttctattgataattttttatattaaagaacaagctgtactacaatggttatttttacaagaatggatattcttaaggattcaatttatagctaaagaaatatgattatatgattagtgcgggaatgaattctctacaattttttgtcccagcaacgagttattcaactttatggataaattcatttattatatgacaaatttagtacttatttttgtttttggtagatctaagttgattcatggcttcaaataatctccgaataccatgtagcctacaatggcaatgagtataaaggctaatgtgcttctgacaaagcaaactagaaaaacatggggtaaacaatgagtgttatttttactaaatgaaactaatggcgatggatccatagctaaatgccaaaatgtgtttctgacaaagtaaacttaacaagcaagtttcaataacttttgcttcatcttttggatttgaagtatcaattaatcattttttcaagcctccttttctgtagataaattcgaacaatcaaaaaacaaggatttaattcttgaataaattgcagttatannnnnnnnnnnnnnnnnnnnnnnnnnnnnnnnnnnnnnnnnnnnnnnnnnnnnnnnnnnnnnnnnnnnnnnnnnnnnnnnnnnnnnnnnnnnnnnnnnnnnnnnnnnnnnnnnnnnnnnnnngtataaggtagtttgttttaaacattaaacaaggataaggataggtattgtgtgtaattcgaaaaaatctcaaaggtgttaacataatttgctctttttcttttttgataaaaattaacaggtaaataatatatacggggtccttatacgaggtcctttttctccaaaatacatttgatcttaatagcaaacgaataatactttgtctataatagtttaactgagacatattcggagtcatatttctctagcacgaagatatccaattggaatcgagaatagattcacactttgttacaacattttcaacacattcgaaagctactcaaaccactatcatatctcaattcgttcatagacacaactcaatgaagagcatgacaaaaatggaacctttttttcaagaattttgattttcctttatcgactccttcaaagagaacaagggatttacgagaatgtttagagttgaattttaaagagaaaaataatagaagcaaaaaaaactattttgtaataaatagtctgaattaatgtttttccaaaacaaaaataaaataataaatcaaaatacatttattattttaattttccttttattttataatactatatagttctcgtagtttaaaaatgaaaaataattgttctgggccaaccaatgtctaaagtgctccaaaattaacatgtaatatcggcccaataagtaaatagtgtagtagtgtctcaaaagtaatgcaatgattacactctctgccttaacgtgattccatcaccttgggcatgcaaagcacttttagtctcttccttttttattagaaatagcttgatgctctgtttggttctgaggagaaaaataaactagataaaaaataaaataaagataattaaagaaaagaaaaatagaacagtagaatgataaattgtttagtttaagagaattagagaaatatctgagaaagagaataaaaataaaaaaagtaaaattctttgattaaaagtatcatcttataggcccaaaatggcaaaatctacacgtgagttggctataaagaaatgttgtattgttttgcattaagagcacaaaagtaagaaatactttgtccacttaaagagaaagttgtgagactcgttgaattttaaagttcactccataatttttttgctatcaaatgtcaaatctcaactccatcgtaactttgatttgtcatgttgtaaagagaatagttccttccataacatatggatgtaatttgatattgcaaacatacattataatcaactcctcaattgcttaatttaattagaaacttcaatgttttttggtgaccaatatgattgatgcaaattatccaaatcttatcactaggtcagtcaatcctatggctagaaactagaaattttagtcaagccatcaattgataatttgctatatatttgtttgatttgttttcacgtttccttttcccactgtgatgcactacctaattctaaatttgaagtttttaaccacaataccactctcatccacgaaaaaaaataaaaactgggcttgtaatcttcatcttactgggcctgggcccagttcccaattcttgatcgaaacactcacatcatcaatttccagtcacacaagaaaagagggaacactatttttttcttcttttattccttcccttcttaccatgatttggacatatcctgtattatttaatattatatcatttttggtattttattagtatccttttgactacgacgttgatagtaatatgccatccgtgatagttaacagtggattaatgatagagacgtgactaaatgtgctagttttgactttaaggtttctgaaattatacgtgtaatacactgcacaaaatcaagaaaaaaaaattatacaaattaaattgcgcatgtgtttttgcatattatactgcagaatatttgtttatttgaacagcttagctgacatcgtatttaattaagtggtgttattcatacaacaatttttatataataatattttttttctttctctatttctattagattattaattaataccctgattgacaaaaaaaaagnnnnnnnnnnnnnnnnnnnnnnnnnnnnnnnnnnnnnnnnnnnnnnnnnnnnnnnnnnnnnnnnnnnnnnnnnnnnnnnnnnnnnnnnaaagaaacaaaaaaaaaaaaataggtcagtaaagttggtggctaaaatttgcaaactgtttattatataaaggtaaaaatagtatggataactgaaaagattgtaaactcttaagtctttagtcttaacagatagatgcttaaatcaggatctcactaaaagaaaacatcaaaatcacatgaaaccttttaaactagttaacttttatatccttttactttggtattagccaatatccaatccttgaaatcaatctagaagcaactgctgttgataagaggtctctctagagaactgacttatttgacacttttggaatctccatatataatattttgatgccacgaataattttttttaagatatatagtttaggtgaaaagagagagaaaaggataagcatatatagaagccactgagtaactcaaaaaggtgaaagaaaagaattacatattttttacatatggagttgccatatatcaacatctatatgatcgaatttaagctgagatgctgccactagcaagggagctatcattttgggaaaggtgggcggcatgagtgcttaatctacaatgtgacatgtgaaagttcctgttgtcacacaatgtgtgtagaaaaacagatatggtactatagcataccccacttcaatttgtttgctaaattctacgacgtggcttcaataattgagtaaaaagcttcattgaaagtttgatatcttttatcttcaccccctcatcattttcaaatgagttaaatgatctcaatattgaaaaaaaattatacagtaaatcaattagaaattatattgaataaatagtgtatgtaatgtattaatagtataaaatactttttttccatcattatttaattataaattattatatataataaaattgttaagtttttatcataattatttaaaaaaattatatcaacagttatttctaactgacatgataatgtaaaatttttatattgatcaaacacataacaattatactcataattaattttgaagttaactattataatttttcatattttttacaagcaaagctttattagaaaacatagtacaagtcacactttaacccgtatacaatcaaatcatatcaaatgaaaagaaagaaagaaactgcaaaacctatacaccaataataagaaaaagaacactgaacatatattatctatttttttttccttaaaccatattcaaaaaaatctaacttttatcacatctaaaatattattgaagacaattttaccatatataattaaatgaaaaaataaagttccttgcatgcatgcacactatttactctgttctaattaaacaattaggcttcaagttgtttctataatacacaatcatcaaatactatagtagttgatattgagaaaatgtcaactagtaagtgatataagtcaagaaactgtggcacacattgctattttcgaaaatataaggtatcacacatgtacgcacaattctgctgcaattatctatcattttgtggctctgtatagtccaacatggatgcaacacaagaaaggcatgcatatggccagctatgccgctgtcttcctttgtatttaagacaaagcaaaactaagcaaaagcagtggctgggggatcctagagttttcttgcttagtgtgctacctacatcagattcagatcgttaactattagccataatttaatttatgtatatatacatagtaagctagacccttatagttttcaccaataatttagattttagaaacatagaacctagtcaaccacgtctctaagttattagcagccaagtctacagtgaatggtttccattttttaaatcttttagctaagcaaactctccgacaagaaagggagagagatttgttcactttatttttttttttcaattttcattttgtactatatatagttttataagttattttcaatattaagaaagaaaacattgattacactttggtattttcaatatgagatttgtgtctaaggaaggagagtacactttaaatgataaatggtagtattgataattataattactaattacttataaaatttgttgtatactatatattttatttttatcacaatcttaaatattaattttttaatcaaccattataaatgatctttatatttttaagtaagatgtacttagtatcttttctctttcggagaatcagatccttcaagtgtaatattttccttttaaattttgctagttaagactgagaggttcacaaaatcctagttttatcgagggggtcattttcaatttgttgaacatatctattaacattaactatgtagattaattgatgtatcttgtataaattgataaattaatgtttgttgcagaatgcagaatgcttgggagttcgatgcttgcagttatagatgctaagaagcctgcatgttctattgtcagcttcctctgcaagaatatttttcgccatgcatatgtggaagtcaaaagtcactatctaagaaaaatgttgtatttgaagaaccaacatcaaaactaaaactattatctggacactgattttgtatagcattttacaatgaaaagaagaagaaaaaaagttttcaatttgaacgataaatttcaattaacctgtataaaataaatttttttaaaagtaattcaatgggaatgcatactaccattttaacaagtatatatttagtgttattatcttttttgttttctccatttttataattttaacctattgtctataatttttcagtcgttgtcaaattttgtttctttattgacaagttttattcctttttaagttcactaagtactttttattcaactacacgttttattttatgccatgttctattttcatatttctaataatcatggtttttcccctcaaaaaaattaatcatggttttaaattgatcaagaactgaatttgcgattacaacgtaaaaggtttatggatttaccgcaatcttctcacaattacaattacgacaatgtcaaccgtgtttttcacaatgtcaataatcaatctcctaacaatcgcaattatgaccatgttaactatattttttcacaaatttttacaatgtcaagaatcacgtcaagatcgcaatcatgattcccttatgagttcaggttctagattcgtcaaaatcaagtttataattttaacatccaaaaccaatttagattttcttcttcaaatcagttcaggttaatctagttattggataaatcagactatgtccacccataactaatcctacaatacatgggtttccccatatgcaatctttaacacattgcaattaggtatactaccctttcaaaccacctcgctacctcactgaatttggtgacaattgtgccacttcacatgataattatctacacatgccccttatatgtaagaaatgaaggtactttccaaaacattaatgtggcattggcacgttaactaggacagagaagagaattgggtgcaaattcagcagcctgagctaagactatccaagagatgtgcccctttcattgtctcataaattggcacttttctttcaatgaagactcaagaggaaccattccaaagcacgccaaaggatttgactgcctactacaaaaagacaaagacaacgtgtccctttgaaaagaccccaccacaccactagcacacattcaacatgatcacgcaattgaatagccatgtaatgtaatttggcatatgccaaacaaactttggatgggaccattttttcattgaaaagataagaagcacagcacatcagatgaatgagagaaagatgcaatgcaacaaaggctctgccaattgcctttctctcatctcatccaccaatctaatttttgttcccataataaaagagcctcatattcagattccttgactatgaatgtagcagtggaactacgattttataagagaataaaaatctttttatttatatcacagtcgtacatatgatagtaagtaacaacatagggctaacacaaagagacacataaaaagcgttacattatgggaacacccatgatttattaacccataatataatacccccataccagacctaccaaatcataaaatatctaagacctaaacgattacatgggaagaaaaatgcattaactgccgtttgagtcaagagactttcacatgaccccctttaatgacacaataaaagtccttgatacacgagtttccctcttgtcattttcactggtaccaaattgaaacctcttgctgtttgtgaagagaatccattcctactccttgtatatcctccttgaaatcaaaggatgacaaatcacaaggggaatcaaacatcgaatggatagtattattgttgtggttggtatcaaaaggagtgttcatgttcatgttcatggtggccttgaaccggtcaaattgaccttcctctcgtgcaaagaagttcccttccaacaccattccttgaccggggaaaaaactgtcctgttgttgtaatccggtatgagaaaggttatgattttctacagctacacagttggcggaacttaggttcttgtttcctacaacatttgtatcatagattgtcataaggtcactaatcattttctggccatcctccggaactccaagaccagttagatcaaatgaaggtgcaaccaaacttgcagactgagctgtagtgttgggttgaacaaaggacttggggaatatgactggcttaacctcagtagcatggaaattgggaccaccaccataatctgcagaactgtttctatatgcacaattcaattgatgattgtccctggcagacctatcctggaaaccaaggcgaacttcactgtaagggcattggggatgctcacatgtgtagattttctgatccatcatcatgttgaagtcactagaaattttcctcttccggatgaaatctaggtttgtgacaacatctcccttcattggatgagaaggttgctgaattggcatccttcccctcattctctccatcccaaggtttgacggatgaagatggtcaggcttccggtcctcaacatcgaagttcggctcttcttcggccccgtcaacatcatactcactgcaatcattgatcaccaaggatccattacctccagcagaggagaatggagggcaatagtcagggtaaagctctctagccaaggtttcctcttggttgatgatggcaagccaggttgcactttcctttgcagtcattttgtcttgaaggcatttggactgcctcacaagcttgcgaattttggcgatatcaggggacatatgcttgatgactgcagtgagaacaccaaccttccacgccttctttaggtcatgtggtttcttgtaaggtggagggccttgatctttaggtagaccaatttgaggccaccattcttcattcccagttggccaccatggtggaggagcacccttctctagtgggaacctcctctgaggaggatcacagtgctgcataagtgctgacaagagagaacccaaggttgtgtcctgtaactcttgcaaggtgtgtggtgtaggaccaatggaattgcatccatcattctttccaggaattgcattatcggcttgatacttagctatggcggcaggaccatttcgatcaaacctgaccttatccttccaccattcgcgaagattgtctgatgctcccgtcactggcttccccttctcaggaattatcccataaacaaacccttgtgccttgcaaacctccatcatcttcagcatgtacttcagtattccatcttgggctcttgacatctttttcctccttgcctgctcttgggattgcctttgctttgctgcatcagtcccttccttggacttggtttgttctttcaatcgcttgtgacgcattttgtccctccacatcctcttctcgagttcatccatatccatttcttcatcactgtagtcatcctcaactacaggatacggttcagtttgcctcacagcaatatccccctccccaagagaaccacataacatatccaaatcgccgcagaaccccatatcttcaaacatcatcatcttttcccagataaatctccagaaaaagagggtttaacctatgagctttcaaatgaagtgagtaacaaactgggctccaaatttcacccccttcaacactataaaccactcaatttgaaaatttctaaagcttctaatggcctttacacctgccaaaagttaaaaacagggaacaattgagacggtgcaaagatcaaatgatactttccagatgaagcgaatatcaaaattcaaaagcataaaatctatatcaatatcttgtatgagattcactagcaacccaactttcaccagcacattttttctttcattctcatccagccatattggatataggctaaaaagtaaaatctaaagttgcttatcacctatgttgcatagctacaatacaaatacatcactaattttaaagcatcgacgcatcatatcactaaatgaaatctcaaaattctcgttttttccccctaaaacaccattcatcaaaacagttattggatcaggattgttctgattgaatagatccaaatcaccaacaaatttaaaaatgaaaatagtcaaaatacaagcaccaaaagcacatgccatggttcaacgattatttaaaaaaatgaaaacatcgctcatcaacccatcatcaaacatatgacgactgaaaggtttcaaaattttctttccaaaaacagatgaggaaacaaatcaaaccagccatcaacaaaggatctaaggccaaaccaatcactcagaaacccgaaaacactataaatagcaacagtcagcaaagaatacatacatacatacatatatgtgtgtgtgtgnnnnnnnnnnnnnnnnnnnnnnnnnnnnnnnnnnnnnnnnnnnnnnnnnnnnnnnnnnnnnnnnnnnnnnnnnnnnnnnnnnnnnnnnnnnnnnnnnnnnnnnnnnnnnnnnnnnnnnnnnnnnnnnnnnnnnnnnnnnnnnnnnnnnnnnnnnnnnnnnnnnnnnnnnnnnnnnnnnnnnnnnnnnnnnnnnnnnnnnnnnnnnnnnnnnnnnnnnnnnnnnnnnnnnnnnnnnnnnnnnnnnnnnnnnnnnnnnnnnnnnnnnnnnnnnnnnnnnnnnnnnnnnnnnnnnnnnnnnnnnnnnnnnnnnnnnnnnnnnnnnnnnnnnnnnnnnnnnnnnnnnnnnnnnnnnnnnnnnnnnnnnnnnnnnnnnnnnnnnnnnnnnnnnnnnnnnnnnnnnnnnnnnnnnnnnnnnnnnnnnaaaacacacaacaaaaaaagaaacaaaaacaaaaaggccagaattttatagaccaagcagcaatcaagaaggaactgaataatgaaaaggagatttttttcttcatgaggagaaccttaccagaagatccagaagtgggttttcttgtgtgaagaccaaaggtgaatagggagagaagaagaagaagaagaacttttgtagaccttgagcagaaaaaaagagatggaagaagaagaagagaaaagaaggagaggaaggtgggaagaaagagtgagtaagaaaaggaacagagtgttgagcattatcttgcttttattattgcttatggtggtgctcttggtgaacgtgtagtgcgggtgtcgttcattattggtgggattaaaacattgataaaagcccaaatatgtggagtaattcaagtttcagagatatttataacattggtttaggttaatctcatcctaaccttgggagatcggttattagtatttattaaatcattaattatgacatgatgtgtgaatatgattaatgaagtttcagtttcagtttcagtttttactttattttagttgtgtgtggggtccgtgtgcgtatcgtatattattgaaacatgaccaatcacaaaagtccacttacattggtaacagacaccaatacaagcttttgtttaacatgttacaaatctcatttgaagcagacaaatgtcaagcgaattgattaagaatgttaaaagtagaaatatttttattaatatatatatatatatatatatatatatattatgattatttttatattttttatgactttttgtaataaatattttttaatcaatatctaagaacacatgttaataaacactttaattatagtatatggttgtgttaaattcttacataataattaataactaagacacccaaatgatttgcctataattatatacattaagattatattcctaaattatgtgtatttgaatttttaaatattcttaaataataatttataatattaaagaagaagaaaaataaaaaactaaaatgcccatgtcaaaagatcaagaaagacaataataacttccacattcccaatctatcttttaatataattaaataatattgaattaattaatctatctatctattaatattttattaatataattcaggctgtctaagaggacacctgtcacttatataaggacctacccttaaactctacactgccaaagctcttcagcgctcaaagcatctctctcacttcttttttaacggaaccgcccatcccctatgaggtactaaggttttgtttatttagttgcaaagagataattgtttccatttaagaacatttaattttgaagaggattaactgtgacaaaattataattaaaaatgttaatttgatttgtgttgtagtacacttaacttgaagaataatagtcatatgttaaacaattaataaatatatttcctattatgaattaaaagggatcgacatatacaacaattctattttatttttacttcttatgtcatacaaaataatatattaatgttatacttgtactgcagaatatgttcaaacaaagcaagtcagtgagaagattgatatattcaacctttgtggttatactgttggagttgccaagtgctaaacaattgatgagcactcatctcttgcagagtgggcatggcgctgtattttggttattgttagttaatgctaatatatatgtataagtaatttattttatgttttagtccatgttgttagttctctaacagaggtgtaaaatcgtcataaaataggaacacaagcaatgttaaattgtagaatctagatagattcaatgggatgaactaaatcataaaatcttaaaaaggtaaatcatatataaaagtctacttcaaataaaaaaattctgaaaacagtaacacacaaacactgaatcagcaacaattcgacaattggacagaacacactcccaaacacacagatcactcaacaaacacaatagcaaacacacaggttaggagtgaccaaatgcttgtcacatgcttaattagcttcattgtgtatatataattctaatttaataatcttgtttgtgcaggctattgtgtactcctaatgaagaggtgtggctaggagtgagtaaaccaaggaactagcatgagtagccccaatggaaccctcaaattggactggatctgctatttgtaagtttaagttgctccttagctaattctttttactttagtgcctactgttcattttcatttcattatatttttctctctttttcttttcagaaaacgttgaaatatgaaccttgcaagaggatttctgcaaagaaagcaatgggacatccttacttggatgacctgcacaagaggcaactttagaaagaacacgttgatttgagatagatttggacgtagaaatgtgtcattaccaacttacattttgagatagaaagatggtatttactagatgggattataagatgacgtttcttctacacaataaaaataggattataaaataaatgtatctgctaacacttagatggtccatgagttttattaatcagagtctcataagttttgaaacaatatgaccatttttaatactcgtcacattttatttagcagttttaatgccaaagataaaactgaaaatcctatatttaggataagatctcttgcatgtcactaattaattgttttattctaaatatgaaatttagatatgggtgtaaaattcctannnnnnnnnnnnnnnnnnnnnnnnnnnnnnnnnnnnnnnnnnnnnnnnnnnnnnnnnnnnnnnnnnnnnnnnnnnnnnnnnnnnnnnnnnnnnnnnnnnnnnnnnnnnnnnnnnnnnnnnnnnnnnnnnnnnnnnnnnnnnnnnnnnnnnnnnnnnnnnnnnnnnnnnnnnnnnnnnnnnnnnnnnnnnnnnnnnnnnnnnnnnnnnnnnnnnnnnnnnnnnnnnnnnnnnnnnnnnnnnnnnnnnnnnnnnnnnnnnnnnnnnnnnnnnnnnnnnnnnnnnnnnnnnnnnnnnnnnnnnnnnnnnnnnnnnnnnnnnnnnnnnnnnnnnnnnnnnnnnnnnnnnnnnnnnnnnnnnnnnnnnnnnnnnnnnnnnnnnnnnnnnnnnnnnnnnnnnnnnnnnnnnnnnnnnnnnnnnnnnnnnnnnnnnnnnnnnnnnnnnnnnnnnnnnnnnnnnnnnnnnnnnnnnnnnnnnnnnnnnnnnnnnnnnnnnnnnnnnnnnnnnnnnnnnnnnnnnnnnnnnnnnnnnnnnnnnnnnnnnnnnnnnnnnnnnnnnnnnnnnnnnnnnnnnnnnnnnnnnnnnnnnnnnnnnnnnnnnnnnnnnnnnnnnnnnnnnnnnnnnnnnnnnnnnnnnnnnnnnnnnnnnnnnnnnnnnnnnnnnnnnnnnnnnnnnnnnnnnnnnnnnnnnnnnnnnnnnnnnnnnnnnnnnnnnnnnnnnnnnnnnnnnnnnnnnnnnnnnnnnnnnnnnnnnnnnnnnnnnnnnnnnnnnnnnnnnnnnnnnnnnnnnnnnnnnnnnnnnnnnnnnnnnnnnnnnnnnnnnnnnnnnnnnnnnnnnnnnnnnnnnnnnnnnnnnnnnnnnnnnnnnnnnnnnnnnnnnnnnnnnnnnnnnnnnnnnnnnnnnnnnnnnnnnnnnnnnnnnnnnnnnnnnnnnnnnnnnnnnnnnnnnnnnnnnnnnnnnnnnnnnnnnnnnnnnnnnnnnnnnnnnnnnnnnnnnnnnnnnnnnnnnnnnnnnnnnnnnnnnnnnnnnnnnnnnnnnnnnnnnnnnnnnnnnnnnnnnnnnnnnnnnnnnnnnnnnnnnnnnnnnnnnnnnnnnnnnnnnnnnnnnnnacttttgttcctttctgaaaagtgaaaaacaacatcttaaagagtttcatttgtggtcttctcaaatcccatatcgaccatcaatggtaaatgttttttcttctcgtggtatcagtttttaaatatttttcaattcactgcaattcatctttttctttcaataagtgaaattcatgttacgtatttgtagaaaattacgtgattcctttcgatgaacctaacctcgttttgtgcagtgtttgatgtcactatttatggtgttggcttaatatcatccacaactcattcttgagaagatgggtttgatttgaaattatataaatcatgtgtatgtgtacacatctatattataataataattctttatggttacagattcactttgtgcttctcatcagtcgacaaggaaaagtaaggctcgcaaaatggtattcaccatactctcaaaaggagagatccaaggtacttatctctaattcaatataaaatgtaaatggtttaatctattttgacctaatgtgttagatcatggtagttacaattgcacaaatcattggatctgaaagtattcaatatggttttatcaccaaaattgcatgttgaatatgagctataagtatgaatctaaattatggcaaggcttcgatccttctacatttataatgttattttattatgagtgacccttgtttgatatttttaggcatatttcatgttatatcaattattaatgtttatgcatgttctgttaaatatatgcactggatcatattcttatagcggttaattgtcctatgaaatggattttgcttattgatgtcttttgggtatatatacaacattgcttaagtttttcttttaattctatttatgctttttgtctttattttatggaaggtaattcgtgagttaactggggtaattatctctcgagcccctaagctgtgcaacttcgtggagtggaggggattcaaagttgtttataaaaggtgggtcaagattgatcccttcattgttccctcagctgatgcatggctaacaaaatacactaaactataataattttaagagacttcattttggttattgtttagatatgctagcctatacttttgcatttgcaatgatcacgaagacaacgaattggagaccttggccattattcattactatgttgagacattggatcgttattttggcagtgttagtttcgtaaattgttgaattctaaagttattaataatttgcacacatacttcagatcctgagtttgtttctcttctcttaccaggtttgtgaactggatttaatctttaattttcataaggtaattcattttctctcagactgtattctttctaataatgcacacagttcaacaatattggataaccctcaaaaaaatcagataatctaatatcatgttacattatatagtttatacggtaaataagactaggatccttgcaggtttgattgcagtcttcattgtaatcaatcatattttcttatttttaatataaatttgaaagtcatatataagtaagaatgctaatgatttaatgaaagaaaagaaaactactatgtactattcggtgtttatcttaatccatgattaaaattgagcttgatcttggcaggcatactttatattggatgaacttttattggctggagccatgcaggagactagcaagagaactattctgagatggataagtgaacaggtaatttttcttattacattttccacttctagtttaccataactatcatattttggacaaaatctggtagtctttaatcacaatagagtctgattttgatcatttacattaggatttacactaaaactcaacataagttactaaagtgaaagtctaattgtagttaaagaatagcagcaaaaacaacaaaggaattgcatcttaattttatcctcatattttataattaatcttgtgttcatcttatgataatgagttacaggaggatttagtggaaactgccaaagaggaagccagctcattgagtaatataatcgctcaagctaccaagtaagagcatcactgaggattgaaattatgttacataggcagcacaaagttttcatgcgggtgaaaatttgttctatagaaaaatcattaaaaaaaactataataaatggttttattagttgtttattaatagagctacaatatgcatattaactcatatttgggttatacctagtgaataaatcttggttattattttattgagattgaaaacttatttttcggatgatgggtttttaaatgaaatggaaaaaatttataaatttggtaaaggattagatccgttgatatcttaatatttcatatagtttaattttagttatttttctcttcatcttctcctccttcttttcttcttctttgtttttaccttcttatttttcaacctcatcgtatatattattgggttcatttatcaccgacctcaattagtttgggttaaaggtgttgttgatgtgtattgaaaacttgtttatattcaattgtttctcactctatgattatttattgaaaatattatgcatctaatgatctcatttaaagtttaaatggtatactatattgtctagtaaaagcagcagaatttggtcacattctttggcatgcttaccatatcataggcatttctcataattctttagtagaacaaggcatgactaccttacatgaggtagtcagcatgcctagctaactcacaataaaagcacaggaagactacagaaaccaaacaatgaaaggaagaagacacgaaagaaagttaaactaaacaaactaagggcaaacacatgtgtggctatctgctagtttcagttgtgttccttattcatgaacatcttgagaatgccacatgcaaaagcatccctaggtatactcttcacgttttgaacagcctcagcaaaaatgacacccattcccatgtgcaaatgaggctcaatatggcaatggaaggcccaaactccaggattatctgccttaaacctcaaagcagtccaaccataagggaatatcactgcagtgttcctcaatggtgggttcttcaagttgaatttggactcgtcaccttgtttgaatttcccatcaccataccctaaaatccaaaagtcatgcccatgcaaatgccaagggtgaatctcactgtttttgcccttcattacattagcattttggagtatcacatcaacaacttggttaaactgaaacatgtaaaccccacttccaatgtttgcattagggttcaagggaggtttcaagatgtcataatccattgagaaattgtcaggtggactttttgggtcaaaggcaccattcacattaaacctaatggagcctaggtaaggagttgttggcaatgctagtgagacattgttaatggcccatttagtgtatccatcaacaaggttttgtgtgttgagaaggaaaagcctacgatcatagtgttgaggaggttgttccgttccctttagggcaagaattttgtaagtgaatgccttgctacgattataatcatcccattgaggtgtgatgggtggtgaagaagtgggaaaaactgaggcagagattgttttgtagtttaggatagttaaaccttgtggggtgttgggtggtcttcctctaacaccaactgaaatccaatagtttttctttgggtcttgatttgttgtaaggagaaccgagtaactttcaccagaatatatgtctatgtcatcaacgataaatggtttcacatagtttccatctgcttccaccaccaccaatttgtgattctataagcacaaagaagttaaaagcatgcaacacatgtcaatattcttcatgctgaaactaattacgtatatgcaactgcacatatacatattgaagtagagtttttacaaaagattatatatggattagtaagtataattcaatcatgacgtaaagtgcaaatgcatagctaggtaaccaactgtctaaatgatactagtatcaatttcaattctacatactaacacagaattttgttatctctgttttctcaccaaaacttcaatattaaattaaagattagaaaaatggatgaaatccaaagataataggcatttcgagtattcgataacagaaaaaaaagttatgccagatatataaaaccttttacccatttaatattttttttttttacagattttacccatttaacataataacttaaagttattaatagtgtgatatgattaatagataatagtatctcttgagctttttaaaaaaatattaataactaatttcttaatgttttgcaaaaaaattatatttaacgtggtattatggcctcctcaactataccgtgtgcatggcatatataaaacctttagtataaactttaattttaacagaaactaagtcctcgtaggcttgtacaattttattttttctttttctttttccccgatcgtcgtgcaatcaacaaaaattgaactttgtgtagtgtttgaaaagaagaagaaaaattgagagaaaaaaatatgaataaagatacttttttttattaagtgatgaagttttatagttcctcccaagtcccaaaactgaagaatccaaaggttaatccctgcaaccatgtgcccaaaggtatggggcctgtgcctgagccaggtagtaaaaatgacaagagctaccttttgtcttctctttcacgttcacgaccaatctacagagtacagcggcagtgacatctctatcatattttatggaaatattgttttgcaacatttattttttatttttcctagtcatcgaaaataaatacttggtttaaaaaaagtactagtttagttctccgagtattaaattcatattttataatttataagaataattttttatattatttaaggtttaatatattattaattatttagtttaaattttaataatggtatgttagtagatatgtaaaatataatttatacagtttttaagtactgtaatttgtttaaaattttataattgatttaagattctattgcaaatagaataaaataaatataaaaatttaaattaattgaattattaaattatttggagggaatgaatatgagatgttacataacattatcttatagaataatatatatatatatatataataaactagtagattttttagatttatatatataataaaaaataaatatatttatatataatatcaaatacagtattaattatttcatatttaaataataaaattccttattttaatttcattaagttggcatttttcatctccttttacttaccatcagattgtgtagaaaagaataaaaaatatataaactcacatttttagttgcttttataaataattatattatatattatactacataatacataaacatttttttttttttgcaaattcaagataagatgctgtatggaactcgggttattaaagttagcctactctgacatttttcatggacatatgcgtcgcatgcaggtttatatatagagtttgtcttgatattaataggcaaatgctaacttggttaagaaactagaaataaaaagttttctattgaattggtaataaaaagtattcaaaaaaatgtgttactagtattttatagtattgctaacaatattaaaaatagttaaaatataagactagttgttatccaaaacataaaatataaaactagcatgatgcatgctactaccaatataaatttcatgaaataaaatatacatatgataataaacttaccccaatggccaagttgagagatgccaaggaagtggtactagcaatcctgatcctgtaggtcttgtttggatcgacatggagaatctgaggtgcacattgttcgttacctctgaacttgcattggggcaaggaggtcttaataagattagctgccaaagaacaattgtattgtcctctcccattaataagcaaagactgaaaaagttaaatgtttgaaaggtaagaaaattctttccattcaaatatctattggctggaatcttgcataggtacaaaaataactaaaggaagtagtgtaggtggctttctttggttacttctacttctagagctattctcaccttgttactttatggagtgaattaaatattaaaagatatttaataggaaaaaatgaatattcttttatgtatgtgattgcaaatgagtatcactgtcgatcatcaagatttttaaatttttctaaaaattctagtgacactcataagtgaattgtcttcttcctaaaatgatttttttatacacatcaaacattattcgaccatgtgcttaagtcttagcccctagtcacttgaaccattgttggtaggacgaacatgtgaagatactattactgttaacaacattgtatctctcgcaataaaattcggtataaaattcggtataatggttataattaaaaactctgaataatatttgcaagtaacagtgaaataattacaatcatttaaaaaaaaatggtaacaataggaaagggaaaacggaaaactgaaacagacttttaaggccttacaaaaatcgctctacttataaatattagtttacattttatattcttcttcttcttcaattgtttagagattcatgcttttttgttgagttagtttttttaaannnnnnnnnnnnnnnnnnnnnnnnnnnnnnnnnnnnnnnnnnnnnnnnnnnnnnnnnnnnnnnnnnnnnnnnnnnnnnnnnnnnnnnnnnnnnnnnnnnnnnnnnnnnnnnnnnnnnnnnnnnnnnnnnnnnnnnnnnnnnnnnnnnnnnnnnnnnnnnnnnnnnnnnnnnnnnnnnnnnnnnnnnnnnnnnnnnnnnnnnnnnnnnnnnnnnnnnnnnnnnnnnnnnnnnnnnnnnnnnnnnnnnnnnnnnnnnnnnnnnnnnnnnnnnnnnnnnnnnnnnnnnnnnnnnnnnnnnnnnnnnnnnnnnnnnnnnnnnnnnnnnnnnnnnnnnnnnnnnnnnnnnnnnnnnnnngaaataattattataaaacttaaccatcttactaaacatgagaattcttaattaaacaataatataaaaaatatgtatactatttctaaattctaatcaaattcttataaaattttgtgaccgggctattagacaaaatcgaatgggcgtatcccatgtttcttctataaaatagtataatttatatatgttttttctttcagaaatactaatagctagctttattttattatataaattcttgggacctctatatataagcacatgattaatagtatcttgaaaagctgatttggcaatggatttattgtttataaaaaaaagacacgtacgtagccatgcataaaataaagattatcgtgaacattagtgttaaaatctaattgtcttcttattggaaattccttaattacttaaaaagtaaatgaatttctggttgaaaattgaatatgttgatttagcaagggagaagacttgtttgcacaaaatccaatatttgcccacttccactagctggtccatttatgttttcttttttccttttgctcagcagggagagaaggacaatacatgtatgtgtttctagctaattcgtttcgaggttagattttgatctgcaatgaatttggatccatacgttcaagatatttcattatccatttttatattcttacatcacaagtgggagataagctgacatatgatatgtccttatacctcattaataatcctatgtttatttattcacataacaacatgagagaagaaaacaaaatagtnnnnnnnnnnnnnnnnnnnnnnnnnnnnnnnnnnnnnnnnnnnnnnnnnnnnnnnnnnnnnnnnnnnnnnnnnnnnnnnnnnnnnnnnnnnnnnnnnnnnnnnnnnnnnnnnnnnnnnnnnnnnnnnnnnnnnnnnnnnnnnnnnnnnnnnnnnnnnnnnnnnnnnnnnnnnnnnnnnnnnnnnnnnnnnnnnnnnnnnnnnnnnnnnnnnnnnnnnnnnnnnnnnnnnnnnnnnnnnnnnnnnnnnnnnnnnnnnnnnnnnnnnnnnnnnnnnnnnnnnnnnnnnnnnnnnnnnnnnnnnnnnnnnnnnnnnnnnnnnnnnnnnnnnnnnnnnnnnnnnnnnnnnnnnnnnnnnnnnnnnnnnnnnnnnnnnnnnnnnnnnnnnnnnnnnnnnnnnnnnnnnnnnnnnnnnnnnnntactatttcttttcatcccaacaaaatatttttcactttattcctcttttctttttatcatttctatttattttcttctaatgtatttcttctctatttcactgttaattcagatataagataatgaagagagaaaaaaaaaaacaaattacaatgacacaccactttagattttttcgtattacacacaatacttctcattttttaacgtttacaacaacttttcttacatgaatgttagtgtaataattgtcggtataatatttttttcaaacatttaaaggggttaaaacagaaataaactagaaaaagagtaatatcgtgtgtaattatatataaataaataaaaagttcagggtgttggagtatatataatttgctaaaaataaaatgatactgtgtgttttgttcgatttacctgaggttcgttaatccatctgaatggcatggaggagagaccaacctcttgagaatgtgtgcttttgtgccaccaatcactcagcaaaatgttgaactcaccatcataatggaatggctccttttttccctttggcaaattcactatcagagaaccatacagtcctgctgctctttgcataccaaagtgtccatgatagaaatatgtacccgcctgcaccacgtttaattttacccatggatattacaaaattaactcatatatattttgcatacattgaccatcatatgcataacacatccatgttttttaaaaaatgtaatatactgtaaaaaaaaattattaagtctgtttttgtaagtataacacatttttttaaataaaaaatagataagagatgcttttggtgtctcaaaatattaattttagtccatatagaaatttaataggttttcggcctctacttttatccaaaaacacatgtttttagttcctaattaaagactaattaaaatcatatcactttttgataattataggaactaaaattaatatttcaaaataaagataatgtaacatataccataagtatttatagctttttttttaagggataagtacttatagctagcacatgaaacaaaataaagagataaacgtaatttagtatgcaaataccctgtcaactgtaaatgtgtaattaaaagtttctccaggagcaatagcacactgtgaaatggcagcagttccatcagcccaaggtgttccatactgcaacatacacaatacaccccaaaaaagtgtacaagtttaatattcgatcatatttctatatgtatgtctagacagcgaaagaaaggaaaaaagtatatataaaacctgtctaattccatgccagtgaataactgttccctctgtggagagcttattggtgagtaaaatctcaagggtgtctccagcttcagctgtgatggttgggccaggaaactggccattgactcccatcacaacgtgctcatggcaatctggctcacgatacatgtactctacattaaacctaatgcggtgcattacagctcctagtgatagctgcaacaaagacagaaaaatgcaccataaggttatagctttaaagctcattatattgttattgcttttgctcatagctagagcctgaattgaattagaagaggaggaagttgtcaaggatttattagaagctgttgatctacaatgtaggttgtggcattatagggccttgcgagtgggtttgtatatatagagaaaggaggcaatacattatagagaggtagacttaatttatcacattcaacatgttgcaatgtggtatgttttcaacttgtgttataaatttttatttttattcttgaattaatctaaaaatatctcttatacaaatgttaattttataatattttatacaaaagggtaaagagataaatacaaaagaaagaaaaaaacatgtgataggttaaatagtatgataaagaatatatatatatatatatatatatatatatatatataaacatgatgtattttttgacatatttttgtcaaatattatcaacgtgtgcaccatcaattgcacataaggaaataacatatcatgtaagcacaaacattaacggtaccaaaggtcttttaaagataatagagtgaaagaattaattttactttaattttaaatttggatccataggtgcaagatatttcattttctatttttatataattaaatcacatgagggagattggtacatcaagaaagcatatgatatgccctttcactatatgccttaagagagaagaattacacgatgtatgttttgtttgatttaattgaggttcgttaacccatttgaaattctgaattgcttggaggagaggccaacttcttgcgtatgtgtgcttttgtctcactcatcaaacatcttccattaaagattacctaaaataacacccaagttataataatacacatctaaaatgagtctgacgtgacactaaagaaaatatacgctttacaaaaaaaactatggtaacgttaaattaacaagaaaataacatatttgggtaataagtgtttaggacgttaaatgcatgtttagtttcgagattattatttaaaaatcttaaaattgatataaaaaatatattttaaaataaaattaattaattacccacgtcttttgtatgtgaaataatttttcttggctacttgtggccattttgtataaaattgttttttatttatcgctcagagtccnnnnnnnnnnaatgaaaagctattaaccaaacacaatatacttgtttcaaattaagaagggagaaaactaattggcagatcttcgataatttagtttctaaagtatattatatatatttcataagagtaaactatcaatttgttctctcaagtattactttctcagcttctaaatggtctttaaagtaataaaattatataaataattctttcattaatttagtttatgcagtgatatattttactaacattcagaacataatttgaaagatttttcaatacttgacgggttgtataatatgatatataatacttaaaagattatttctatttttttttggtagcatgaaatattatttatgtattttatttagttcgagagtatggttatatttagtaaaattagttggtattcaataagattagttgttgaaataaataaaaagtgtaaaataaaaaaattatgatttatttaaaaagggtaattagaaaattaaatatatatattaaaaaattaaaaaaataaaaactagaggctatcattttgaaaaaagttaaattaaataacattttaaaaaacattaaattaagtaacattttaaaaaattatagaatctacttaaaaaaaaacttatttatcgaacagttaaacaaaattttcaattaataaaaaactaaaatatttaaccaaacataatctatatgagagaatgtactttataattgcaaccaaaaaataaaataatactttagaaatgaaattggtgttttattctattccaaaacaatttttcaaaagtattaatattataatgcaattaaaaacttagcctaacttcaaagtattaatattataatgcaattaaaaacttagcctaacttcaacaataactaaaaaagttgggacagattatatacttacatcatgatttaattacaaacattatcatatataataaatttattaactttaataattactataaaaatcatatatcagcagttttttttttattactaactaacagtgtttttacacttatgtacctagtcattacattttttttattactaattaacagtgtcattacacttatgtacctagtcattacactttataattatttagcagcacaggtaaatttcatagctttttggaaggaaaagagtattgtttaatattattcaaaatactatacaaagtcagcataacaacacatacccaaaaaatggtccatgtccattggtcatttatcaccagttgaagattaatctcttgtagtcgagttatgatttcagcctaaattaacatatctgtttgttaccaggggttcaaatttattgatacccaacatatgatggaattcatgttgtcagattatgattgtgatgcatatttatcattgctggaactatcgccaaattatattaacatgaatgacttaaaaacgtaaaagaggagacaaaaaaaatatgacaaaagtgtcagaagtgggatttgaacccacgccctctcacgaggaccagaacttgagtctggcgccttagaccactcggccatcctgacttttgatgtaagtgcgtaaaccacaatttatacttctattttatttaaataacaaaatttctctaaaatgcatttctataatttttttttatcaaattaaactacgctcaattataaattattgtaattgaataaaaatctgcaaaagtatagaaattatttttctttaacttgtaaacatagattgaatcacatctagaattgtataattaaaaattcggcattccatcctacaattgtttgattcacgttgaagtttctttgtgctcatgtgaaactagttctatttgaagcgttcataacttatgtacataggaccgatatcaacacgaagttttttatatgttttcgataagttttacaaaatttgtaatatttcgatacgttctcgatatgttttaatattaaataatatttttttatatagagtatatttcatattaataaaatataataaaaagaaaatcatcagcataaataatagattatccgtacaaaattaataaatacatcaactagtgtgtgaatatgaaggaagaataaacttcattctatttaggacacctttttttttaatttacaaaagtatcttttaaaaatatttgactaaaccgatacgtaaggtatcgatatctgacatgtatccgatacgttgaaattttttttttttctaaatnnnnnnnnnnnnnnnnnnnnnnnnnnnnnnnnnnnnnnnnnnnnnnnnnnnnnnnnnnnnnnnnnnnnnnnnnnnnnnnnnnnnnnnnnnnnnnnnnnnnnnnnnnnnnnnnnnnnnnnnnnnnnnnnnnnnnnnnnnnnnnnnnnnnnnnnnnnnnnnnnnnnnnnnnnnnnnnnnnnnnnnnnnnnnnnnnnnnnnnnnnnnnnnnnnnnnnnnnnnnnnnnnnnnnnnnnnnnnnnnnnnnnnnnnnnnnnnnnnnnnnnnnnnnnnnnnnnnnnnnnnnnnnnnnnnnnnnnnnnnnnnnnnnnnnnnnnnnnnnnnnnnnnnnnnnnnnnnnnnnnnnnnnnnnnnnnnnnnnnnnnnnnnnnnnnnnnnnnnttatttataaataaataaggtatcagagcatacatttgacaaaaatgaaaaataagtgagaagaacaatgaataaaaagaaggatggaaaagattgacatttttaatttaaggtcttgttaactagtatcaacattaattaaaaaaagaatatttattatataatttataagaaaacataaaaaagatcattgatagtacatttttccatctcacaacaaaatcatttatattttatgtttcttaatcaatacactggttaacatttatcttcaatttaaccaattcaaaaccaagtaaaatatggggctcttttttagttaacaagggagatgatgcaattatgtcttaaaaccactgtgtttctttaatgacgtgattcaagcatgatataaatagaacatcaaatgctccaaattttccgacgacgaattataacatcgagtactctaatggtgagttgtttgaaaaatatacaatacaaatagtctagccaaaaacaatgagcttatttgttccgtagttaattgccaattgaagccaacaatacattcagaattcagaaggtaagaccaattcatttgaaaaccagaaaaccattcccccaaaattaattattacacctccagtgttgtttaaaatgatatttaaaattctgagtggttaactcgaaccatcaaaaggtaacacaagattcctatctgtgggtcttgtttgccattttcattgcatcctttgcttgataagtgcaccttttaaatggaacaagatatatattcctaataacttgaaccaatttgttaagcaaaagtcaagaggattaagctcagttaattgaataaagatgcaaaaattattataaatcttctaatttgtctttggttattacggataaaaaaataactcgaaccagtttgttacccgtcaattaacgagggataagccatctttaaagaatttgtctccttgcacacgatattcagtgacatcaagcaaaagttacatatgtgaagtgaataccacgacgataaacacatgcattgtcattgacaaagaaacaaaataacaaagaatggagagcaatacgtcacacatattttatcagagtgactaagtcgatttttttcccctagtatttcatcaatagatattcaagtctcaacatcattgtcagatcataatattgttacaaattccaatgcccttcagtatgtaaatttacatataccagagattacatttaccactgcccattacactatgaggtaacacttaaaattttagaatacatatatataattcaacgcagattgagatcctaccacatcacgttattcacgagcagtttgtatcataacttacaagtcccaacaactctggaccttccaaacgaggattattctcaaagctacagcattgaaacaaaacaacgcttattcaacaagtaacaggaaagaagaaagataaccagatagcagaaaatattttcaagctaaaatctagaaggcaaaatttaaatgattacagaatcagtgcaccagaaaaatgcaagaagaccaagtataattaactgtataggacaataaaatgcaatcaaattccctgtcatcacaaatacattgtaccagggaagcctcccaaaagctgtgtcaattcctactatcccatgaaacaattggaaattgcctatcacatacactttgtgtcatcatcacacacaacaacgaataacaatcaaatattatcatcacaatttaaacaggacctccataagtatgacgtgaacaggacacccacaacatcttaaccattaagcaataaaaattgcaagcgtgatatagcagcatttagcagcgaaggttactaaatttctcattgttacccccttccctcccccaaggccccaacaaaaaaagaaaaagaaaaggaaggaacaatattaaaaaaaggtgcagaagagaagaaaataagactcgagtgaaagccaacatgaatagcaccacatggagaataagaaaaaagctacatgcttagagttaagaagaaattacttattcaatggaatatgctcgaatggcccggaggtaggaattgtaccacataaatcattgttggagacatccctgaaaataaagtgaatgtttaggctctttgaaagcataaatcttcacgataccaccaaataatgttatcatgatcaacatataaagacaagattgttacttacactactttaaggcttgaaacagcagcaagttccttggggattgggccagttagtcggttgtcattgagtcgtctgcaaagaaaacacagttgagagaattatgaaagtgctgaatatttattccacaaaataataatcaaaagtctcaccatatcatattgaaacactaacagcttccaacacttcaaaatgggattactaactcagattaatatttattaatgttattttaaattgtcacttagcttccaggtttggctgaataaatttcagactctgggaaagctaaaagctaggttgaagtattttaccacctaaaaaaggtaaatagctttctatgggtcattcactgactagaggtttgataaggatattgaattgtgcttagacatggtccattgaaatgtttagatagagcttttaagtttgtttagaattgaatcataccactgaatgttgggactgaagtcatctcaatttaatcaaaatgagtcatactagaatagtaaaatcactctttcactcaattatggtgggggggatttaaggggagaaatttttcacactgattggactaaattatgctttacttaatggcttcatttgtctactattttaaggatatgatagtaaattattttatttcctttgaactaaaacactctgttgatatttcctcctatgaatgaggtttatatttgggtttgagcatgtgaattttgaaagaaattcatttcatatctactgtcataattcatctgtcttaacatcaatatatgccctacagtcaacatcttaacaccaagcacaaaacccaaaattgtccatgcccaaacttaatataaaatgtagtcgataagttgctaaccaaaggttcttgtactatgcctgcatcattcaaagtcttgtaagaaattcaaatgaaagaagggaaagcaaatgccacagatctgtccagtcaagcttaatatgttattaaacatacttacaaaaagacaagattcttcaatttccccaatgaaggtgggatggtgcctgatatgttgttgttgtacaagtccaagctaactagactcttcaggtttccaagttccggaggagtagttccttgaatgttgtttttgtacaactcactacatccaatgaaaggaaaaccacattaaacactaacaagtataaaattctatagttcacaacaataagagagccacagcatataccaataaatcaatcattttagtaataatatgagcacaatatgaaacagtgtcttatactttcatttgttttacgtctacgatacatatccaaaaccaatactcttggatacttcaccaacacatatctatgaagtatccaagccttttaaaaaaagtcatgaaaatataatctactatagctacatatcaaacttcaaacataatatagaaacatagaagcattgttccttaatgaagcaaaaaatgaaattgtcctctttatggatgatttcaagagaggaatgagattgatatcattcctacttatagacaatagaaagtgatttatgatgacaatgctttatagtttttattttattcatagtaatgtccaagaagtgtgttcttaatttggatttgcaattatatgtttattatgttttatgaatttttatacatatctacaattctagatattcatctttcacatattgtatctaatatattttatgtatcagatgttgatggaggtccacatacatcagatgtttattatgttctatgaatttttgtacatatctaccattctagatattcatctttcacatattgtatctgatatattttatgtatcagatatttactaattgtatcgccgtatcggatatgttttgtatttgatacatgcattgtactatgcatcataagagcataaataacaaacttaaagtcctctttattcctatttgacaacagaaagtgatttatgatgacaatggtttacaatttttattttgttcataagtatcttaacgtaccatatctgatatatttttaggataaccgcattaacgtaccatatctgatacatgtattgtgtcaatgcatcataagggcacatttaacagacttaaaaagtcacaatatctggaaaaaaatgtaaagcgaagttagaaaacatacagatactgtagatgctccagcttcccaagttcaggtaccaaatgtccagataggttagagttaccaagatccctgtagaaagcaccataattaccataaacatggagagaatattaacagattcagtcaattcaacacattttagttagcatttcagcgagccctggcacagcgttaaagttgtgccttggtgacttgttggtcatggattcaaatctggaaacagtctctttgcatatgcaagagtaaagctgcgtacaatatctcttctacttatcttcgcataacgagaagcctctaggcgatagggtacgtagttttttatccttatcctatttgatacatttccgaatccaatactcatagataattcaccaatacaaatatgtgaactatgaagtatccaagcctttaaaaaaagaaatgaaaatcaaatatagctatatatgagacatagaactgatagaagcctgtatacagtgtaatacagaaacatgaatttcacttgcatattttaaattgtttatgcatatctagatatgcatctcacacatattacatcctacatatttttaaaaataattgcatgagttgaatttcaatttctatgtattgtcaatcaatcaaaaatcattgttggcataacttttagggtaattattttaaaagtcaacaaaatttccatatatgactatttactctatgtatctatatacatatcgtatcaatgtatcgtatcataagcaacaataatcccccgtccagaaaatcaaacatctaatttaaaatacataaaaaagaatcccagtgatggagaacataagaaagtatctaaagacaacttttaatggcatgtataatttgacgattcccgcaacctcgcggaggatccttcaatttcataagcaattaacaaaataacaaacctcgctaaaaatctaaaatcagcaagcaccgcgtaataataaaactgatagcagcagtataaataaattaaagtaacatatagtaacaattaagaaagcaacaaaacacaaacacacacagagagagagagagagagagagagagaggatgcatacactcgagtgactcggttgtcctggttgcaggtgacgtggaaccaagtacaggggctaacgagagtgggatcccagctctggaggacgttgtcagggtccgagaggctccgtttcagcgtgtagagagcgtcgccttcggaatttgaggcggcgaggtgagcgagagttagggttacggagacggagaggaggaaccgcagagaagtgcgagttgctactgccatcgctgatctgagcttcaaccgaacacctctcgttgccgccgtgttagggttcactagcggtgagctcttattggaggaggatgcagcaatcgcgctgcaacgaagaaagaaagaagcagagggaggaggaagttctagagagagagagagacaagggagagggaagaatcttattatggagagagagagagaaaaagacttgaaaaggaagtatcggctttgggaataacacatagcagtaaaacatggcatgctcgccctcgcttcatttttataacttccttccattataattgttatatataaaagaaaaaaaaattatattccttaacattaattaattatatttttttattatttacatctcttataatattaataataaaatttgtaaataaattaatagtaatataaaattaatattattttatttattaaatatttttaatctatataaaataatttaggacgaatgttattttgaaataaataaaatatttagtttttcaaatgagtttttatatcttcaattaattcaaaattaattttgattgannnnnnnnnnnnnnnnnnnnnnnnnnnnnnnnnnnnnnnnnnnnnnnnnnnnnnnnnnnnnnnnnnnnnnnnnnnnnnnnnnnnnnnnnnnnnnnnnnnnnnnnnnnnnnnnnnnnnnnnnnnnnnnnnnnnnnnnnnnnnnnnnnnnnnnnnnnnnnnnnnnnnnnnnnnnnnnnnnnnnnnnnnnnnnnnnnnnnnnnnnnnnnnnnnnnnnnnnnnnnnnnnnnnnnnnnnnnnnnnnnnnnnnnnnnnnnnnnnnnnnnnnnnnnnnnnnnnnnnnnnnnnnnnnnnnnnnnnnnnnnnnnnnnnnnnnnnnnnnnnnnnnnnnnnnnnnnnnnnnnnnnnnnnnnnnnnnnnnnnnnnnnnnnnnnnnnnnnnnnnnnnnnnnnnnnnnnnnnnnnnnnnnnnnnnnnnnnnnnnnnnnnnnnnnnnnnnnnnnnnnnnnnnnnnnnnnnnnnnnnnnnnnnnnnnnnnnnnnnnnnnnnnnnnnnnnnnnnnnnnnnnnnnnnnnnnnnnnnnnnnnnnnnnnnnnnnnnnnnnnnnnnnnnnnnnnnnnnnnnnnnnnnnnnnnnnnnnnnnnnnnnnnnnnnnnnnnnnnnnnnnnnnnnnnnnnnnnnnnnnnnnnnnnnnnnnnnnnnnnnnnnnnnnnnnnnnnnnnnnnnnnnnnnnnnnnnnnnnnnnnnnnnnnnnnnnnnnnnnnnnnnnnnnnnnnnnnnnnnnnnnnnnnnnnnnnnnnnnnnnnnnnnnnnnnnnnnnnnnnnnnnnnnnnnnnnnnnnnnnnnnnnnnnnnnnnnnnnnnnnnnnnnnnnnnnnnnnnnnnnnnnnnnnnnnnnnnnnnnnnnnnnnnnnnnnnnnnnnnnnnnnnnnnnnnnnnnnnnnnnnnnnnnnnnnnnnnnnnnnnnnnnnnnnnnnnnnnnnnnnnnnnnnnnnnnnnnnnnnnnnnnnnnnnnnnnnnnnnnnnnnnnnnnnnnnnnnnnnnnnnnnnnnnnnnnnnnnnnnnnnnnnnnnnnnnnnnnnnnnnnnnnnnnnnnnnnnnnnnnnnnnnnnnnnnnnnnnnnnnnnnnnnnnnnnnnnnnnnnnnnnnnnnnnnnnnnnnnnnnnnnnnnnnnnnnnnnnnnnnnnnnnnnnnnnnnnnnnnnnnnnnnnnnnnnnnnnnnnnnnnnnnnnnnnnnnnnnnnnnnnnnnnnnnnnnnnnnnnnnnnnnnnnnnnnnnnnnnnnnnnnnnnnnnnnnnnnnnnnnnnnnnnnnnnnnnnnnnnnnnnnnnnnnnnnnnnnnnnnnnnnnnnnnnnnnnnnnnnnnnnnnnnnnnnnnnnnnnnnnnnnnnnnnnnnnnnnnnnnnnnnnnnnnnnnnnnnnnnnnnnnnnnnnnnnnnnnnnnnnnnnnnnnnnnnnnnnnnnnnnnnnnnnnnnnnnnnnnnnnnnnnnnnnnnnnnnnnnnnnnnnnnnnnnnnnnnnnnnnnnnnnnnnnnnnnnnnnnnnnnnnnnnnnnnnnnnnnnnnnnnnnnnnnnnnnnnnnnnnnnnnnnnnnnnnnnnnnnnnnnnnnnnnnnnnnnnnnnnnnnnnnnnnnnnnnnnnnnnnnnnnnnnnnnnnnnnnnnnnnnnnnnnnnnnnnnnnnnnnnnnnnnnnnnnnnnnnnnnnnnnnnnnnnnnnnnnnnnnnnnnnnnnnnnnnnnnnnnnnnnnnnnnnnnnnnnnnnnnnnnnnnnnnnnnnnnnnnnnnnnnnnnnnnnnnnnnnnnnnnnnnnnnnnnnnnnnnnnnnnnnnnnnnnnnnnnnnnnnnnnnnnnnnnnnnnnnnnnnnnnnnnnnnnnnnnnnnnnnnnnnnnnnnnnnnnnnnnnnnnnnnnnnnnnnnnnnnnnnnnnnnnnacaaattaactaatggaaaatttatttttacttatagagaaacttatctcatctttttccttttattttcttcttctaaaagtatttataaaaaaatttatccaaatatctcctaaaaacgaaacagatgtgaaaaagaattaggaagaaaagtggcatattgtgtgtgcaaagtagagtacattttggtaagtggcgtattttgtgtgataatgctaagtttgtgcaaccaccattactgacacaacctaaagtggttgggagaatccaaattggtttaattattttatggctgtggtgttacatcctcacttttgtcaacgcatccatttatcttataatcctctttttatttatatgaaggataccctcatctttctatctcaggtgtattggttaagtctataaaaatagaacactgtgtaacaactatttattatgtcagaaacatacaaatcacttcaagtaattgaaaattgttaaaaacggtatctgatggagtataaagaaaaaataatctaaataaccatataaaactagttaatattatattttataaaataaaataaaaggctaacttctttacaaaattattttgtatattgtagccttggaaatatgatattttcatatttgatacgtgtctctctaaacattttaaataaaatatcagaagttaaataaagttaataaaaaaaaagtgaaacaacataaaagtagtcnnnnnnnnnnnnnnnnnnnnnnnnnnnnnnnnnnnnnnnnnnnnnnnnnnnnnnnnnnnnnnnnnnnnnnnnnnnnnnnnnnnnnnnnnnnnnnnnnnnnnnnnnnnnnnnnnnnnnnnnnnnnnnnnnnnnnnnnnnnnnnnnnnnnnnnnnnnnnnnnnnnnnnnnnnnnnnnnnnnnnnnnnnnnnnnnnnnnnnnnnnnnnnnnnnnnnnnnnnnnnnnnnnnnnnnnnnnnnnnnnnnnnnnnnnnnnnnnnnnnnnnnnnnnnnnnnnnnnnnnnnnnnnnnnnnnnnnnnnnnnnnnnnnnnnnnnnnnnnnnnnnnnnnnnnnnnnnnnnnnnnnnnnnnnnnnnnnnnnnnnnnnnnnnnnnnnnnnnnnnnnnnnnnnnnnnnnnnnnnnnnnnnnnnnnnnnnnnnnnnnnnnnnnnnnnnnnnnnnnnnnnnnnnnnnnnnnnnnnnnnnnnnnnnnnnnnnnnnnnnnnnnnnnnnnnnnnnnnnnnnnnnnnnnnnnnnnnnnnnnnnnnnnnnnnnnnnnnnnnnnnnnnnnnnnnnnnnnnnnnnnnnnnnnnnnnnnnnnnnnnnnnnnnnnnnnnnnnnnnnnnnnnnnnnnnnnnnnnnnnnnnnnnnnnnnnnnnnnnnnnnnnnnnnnnnnnnnnnnnnnnnnnnnnnnnnnnnnnnnnnnnnnnnnnnnnnnnnnnnnnnnnnnnnnnnnnnnnnnnnnnnnnnnnnnnnnnnnnnnnnnnnnnnnnnnnnnnnnnnnnnnnnnnnnnnnnnnnnnnnnnnnnnnnnnnnnnnnnnnnnnnnnnnnnnnnnnnnnnnnnnnnnnnnnnnnnnnnnnnnnnnnnnnnnnnnnnnnnnnnnnnnnnnnnnnnnnnnnnnnnnnnnnnnnnnnnnnnnnnnnnnnnnnnnnnnnnnnnnnnnnnnnnnnnnnnnnnnnnnnnnnnnnnnnnnnnnnnnnnnnnnnnnnnnnnnnnnnnnnnnnnnnnnnnnnnnnnnnnnnnnnnnnnnnnnnnnnnnnnnnnnnnnnnnnnnnnnnnnnnnnnnnnnnnnnnnnnnnnnnnnnnnnnnnnnnnnnnnnnnnnnnnnnnnnnnnnnnnnnnnnnnnnnnnnnnnnnnnnnnnnnnnnnnnnnnnnnnnnnnnnnnnnnnnnnnnnnnnnnnnnnnnnnnnnnnnnnnnnnnnnnnnnnnnnnnnnnnnnnnnnnnnnnnnnnnnnnnnnnnnnnnnnnnnnnnnnnnnnnnnnnnnnnnnnnnnnnnnnnnnnnnnnnnnnnnnnnnnnnnnnnnnnnnnnnnnnnnnnnnnnnnnnnnnnnnnnnnnnnnnnnnnnnnnnnnnnnnnnnnnnnnnnnnnnnnnnnnnnnnnnnnnnnnnnnnnnnnnnnnnnnnnnnnnnnnnnnnnnnnnnnnnnnnnnnnnnnnnnnnnnnnnnnnnnnnnnnnnnnnnnnnnnnnnnnnnnnnnnnnnnnnnnnnnnnnnnnnnnnnnnnnnnnnnnnnnnnnnnnnnnnnnnnnnnnnnnnnnnnnnnnnnnnnnnnnnnnnnnnnnnnnnaacgtatgaatctaactttttaaaaaatgaaatatctgatttaaatttatttatttaattttaaaaccaaataagtataaacaaagtatgtacttttaattacagctaaatttatcacgtatgcatattttgtttagaattttaaacatattcatgtattgtcaatttttatgtatcttttcaaagtaaataaaaaataacgttgtagtaaaaaagttgtacctgctgctagttaaatgaacatgatttctaggataaaaaaaaccaattattattatttttgcacattgatgtctccccaaaattcatttattcgcacccccagcattatccacaccaaatgctacgaacgtgaatacaaaaaggcattttatcgaaagaatcgatgtttctctttattaaaaaaaaaaaaaaaaaagtagtaacaaatgctgagggaaatggggcccactagtgcaaacgtaatgaccatgctccacctttacgaaccgaatcccaaaccgtcatcaaattttgcctagaaacgtgatcggatctcagccctccacgtcatcacaccacacctcatcatcaaacgtccgagagcgggtaacagcacaaactgcatagagcgtcacagcagagtgcgtcatttatttttactcttcgtagtcccccagaggaatgagaggatgcgaaccggtgcacattcactctcgctgctgccgctattaaaagagtgaagggagcgagtcatagaatcacgcttcaaatcatttgcattcatttttcttctctctgcttcttctgcgccattttagggtttgggtttgtgcttgctgcttgcttctgtcactgattttctggtgaggaaaacgcctactcttcttacctcattaattttgcttcgttttttcgttgctatctgtcatgatcacatgctgcatttgccattttctgcgtttttcttccgcttatttcgtcctcagtgcttgtttcaccgtttaatcctggcctattgatggtttagcgttttctgctttcgaaatgcttcactgtagtttatgttctttcattttcctgcgtttttttttttgtaatgttttgttttgctgcatgtgtttcggctttgatcgtctttttttgcatgtttattttgaagaggaaacgctttcgctgtgcttcgttgaatttgagctcgtttttgcttccgaggagaagcttgtttgttagaatcttcagtgcttttttgagtttaattctagcggtttcattggttgtgatttgcctgtgtcgttgtttttttttttttttttgcttttttaatttttatttttaaattctacagagtttaataaaattaatttttcagagtgttttgagtttactccgtgctttttcactgcttgtgatttagccgtaacattttttttgcttttactttttttgaaagcgaaaagccgaaaactctgtttgctctgatgatggtccgaatcggtgaccacacctacttatttttgggcatttgtgttccgaagccagatatttgcttcagggtacctgattttggcctccgagtatcttttttgtgtttagttgtatttattgtttaatttcgtttgtatttgtattttatttttttataaattttacttgttttagctttttacgtcctccgtgctgatgtcgtttactgcacttttgtgtattttattttgcttgcagtgcatgtgattatttctatgttggtttatttgtataaaatgcgttttgctggttacttgtttgtttcatcaatttgagttagaaatgttgttctagattctatattctccccttgtaaatctatgattattttgctgtttatgatagttgttcctttttcattttgttgtgcgaaaatgttttactatattgtttttcgcatgattagaatttttatgtagataatttatcagtattttgttgcttttaaacttcttttctcagtaggtttatttgtataaacgcattttgttgtttgtttgccttttacgcttcctgtttgagtaataaatattactctaggtttttgtttcccccctcttaaattgatgtttatttttcagttttatttgcatgatagcggtttgtctcttattttttttgtatgaaaatttgttgtaccatagtgttggcgtctgcttagatatgcatgtggacaatctcacaatatttagttatttttcaaattttttgttcgaaggaatatgtgaagtaactacttatgttgacacaatttatttaatgcatgaactatgcagtagatggcttctttcgggccaaatggaactgagaatgaggattcgttgcctcccccacctcccgttgtaccatcagatgttgtacctgttaaagctgagctggagaagaaaaaggcttcaaggtttccaatagccaggcgtggccttgcttcaaaagggacaaagctacaactgctcaccaatcactacagagtgaacgttgcaaacactgatgggcatttttatcagtatagtgtatgtgctttcattttcacctgcattatttatttcaggtctctgtttaacttggaatcatttattcaatgtttatgtttgaacaggttgctcttttttatgatgatggacgacctgtggagggtaagggtgtagggaggaagcttctcgacagggtgcatgaaacgtatgattctgaattgaatgggaaggattttgcgtatgatggtgagaagactctgtttactctcgggtctcttgctcgcaacaagcttgagtttacggttgttctggaggatgttattgctaccaggttcaaattctgtggatgctaattcttcaatttgacttaactttttactgtttcagctttgtaacttttttttttctgtaccaatgtatgttatagaaacaatggaaactgcagcccagagggcaatgaagaactgaatgagagtgacaaaaagaggatgaggcgccctaatagatccaagacatttaaagttgagcttagctatgcttcaaagattccattgcaagccattgccaatgctctacgtggacaggaatctgagaattatcaagaagcaataagagtgcttgatatcattttgaggcaacatgctgctaagcagtgcgtggattatgatcatttcttttttcttctattattattattattgataacattattgtatcagcttgcctttgtgtgtctcttatgttgtaatttaaaataataaaataatgtcaatttgcagagggtgtttgcttgtgcggcaatcgttctttcacaatgatcccaggaattttgctgatgtaggaggaggtgtacttggttgcaggggcttccactctagttttagaactactcaaagtggactgtctttgaacataggtttgatctgttgtttgccttggacactacatttgtttcctcataatttttattaattctgtcttgcaatatgtttagatgtctcaaccaccatgtaattacccctgggcctgtggttgacttcctaatatccaatcaaaatgtgagagaccccttttcacttgattgggcaaaggtaagctaattcaatgaccatttgatcatagtacttgattgattgccaaatacaataatctcatcttttatttattttcttgaacaggccaagaggacattaaaaaacctgaggattaaatcgagcccatctaatcaagaatttaaaatcactgggcttagtgaactcccttgcaaagaccaaacgtatgtcattaattctgcttttgttcttgataattaattattattaattttagagatttttaattatcagggttagggtgttgtaggtttacattgaagaaaaaaggtggtgttgatgttactgaggaagaagtgacggtatatgattattttgttaatattcgcaagatagatcttcggtattctggggatctcccatgtatcaacgttgggaaaccaaaaaggccaacttacatccctcttgaggtagatttggtgctttatatgtttgttcaggactttgaattagaatttctttgctgcttaataactttttaactttttatgcttagctgtgttgtttggtatcacttcaacgttatacaaaagcactatccacacttcaaaggtcttcattggtggagaagtccaggcagaagccacaggagaggatgagggtcttgtctgatgtatgtgtctttttgtccagttttgaatatttgggttgtatattttctggtttacctgatgttactttaattgttacaggcacttaaaagtagcaattatggttctgaaccaatgctacgcaattgtggaatctctataagccccaactttactgaagttgagggtcgggttttacaagctccacgggtaaattttaagtcattgtaattgtgcatgtgcttattcatttttatcatgtattgtctgctatatcttcatttaaatagactgttagcgaatattgatgaatattgtggtggtgacttaattttgttaatattgtgctcagagaggtgtagctttaaatattgctttgcttaattgtctaagaatagttggtaatataatcttcatgttctaccgtaaccaattctagttggttttgtatggaaatgtttgtcaaattattaagatgtagttttatttgttgttgatggcatcttgttcgttaattatcaatgttgtgttctgtaatatgggtttcaaagctgattattaaatttttgtttgtagttgaaatttggtaatggggaggacttcaatcctagaaatgggaggtggaacttcaataacaaggtatgtcattctaatcttgtattaatttcataaaaaaatgatttgaattttctaataattgaatttttttctccagaaaattgtcaagccaactaaaatagaaagatgggctgttgttaacttctctgctcgctgtgatgtacgaggacttgtgagggatctcattaagtgtggtggaatgaaaggcattgtaagttttataactgcagattgactctgaagcataataaggtgctgactatatttttcttaactgcaattggtaggtgatagatcagccgtttgatgtgtttgaagaaaatggtcagtttaggcgtgcaccgccggtggttcgagttgagaagatgtttgagttggtccagtctaaacttcctggggctcctcagtttcttctttgtctgcttcctgagaggaaaaattctgatctttatggtaagttatttgataagttttgtcttttgtttactcctttcatgcaattgtttaagtccccttattgatgaaaattaactgaacttggtaaggtccatggaagaagaagaatcttgctgattttggaattgtgactcagtgtatagctccgacaagggtcaatgaccaatatttgactaatgttctgttgaaaatcaatgctaaggtatgttgtttcttggtttaattttctatttttttggaatatatattgtaattctttttgttcagtttgtcgggattcattgttgtacctgtcattaaattttttattgttttgtagcttggtggtctgaactcaatgttaggtgttgagcattctccttctattcctattgtttctagagcgccaaccatcattattggcatggatgtgtctcatggttcaccagggcaaacagatattccttcaattgctgcggtattttaattagtgcttgttatgtgatttttatattgggcatctgtttcaaacctatgattgtcttagtttgagcctacttcctggttattggaatgttttatgactatctgattatatgctaatgcttaaacattcaggtggtcagctctagagaatggcctctagtatcaaagtatagggccagcgtccgtacgcagtctccgaagatggaaatgattgataatttgttcaagaaagtttccgacaaggaggatgaaggcataatgaggttaatttaattttgtatcaaatcattgaattaatcctcctagtatatttatgatatcatattgttctcaattttttttaacattaattttgaatttggttatgtgaaatgatcagaatttggtttctaaatttaagtgaatgccagtttagttgcaattttataaattataaacagttttttgtggtacctgtttattttgtggtttgtattttttggaattggacggtcattggtgtgttgtatatctgcagggagcttctacttgatttctatacaagttctgggaatagaaagcccgataatataatcatattcaggttactttttttctcattttattctgtgtaatatgtactttatttttagtttttataaatttttttgagttgtgtgtgtgtgtgtgtatattgttgttagtctgttatctagtattgtggtggttaatatgtatggcagtttgtgtaatagttgattagtttaaaagggacttgattgatggtcttttttagtgttttgaatgataaagttgtatgatacgatccttgttatctgttctgcaaatctctttttatgtcaccaagacaaatgtcaaaagcttatagatttaacaaatgcttctgtttagtttgcaaatcctgacctattttatgttagatgatcagttgttggacctataatgtgtatgttgttatatgtgtatgtgtgtactgaattgtatatattttttaaaaaaaaattatttgtctttggccttttttatgtctattattttattagttcttacatattttttcataatgaatctttttaatttgtattgttagttaagtgacctttttgtgtattttgaactgacctttttttggctggatgtagggatggtgttagtgagtcccagttcaatcaagttttgaacattgaacttgatcaaattatcgaggtgcttatttattgagctgatgaatttaaattttaaatatttgaagtgtttttggggttaatattgtcttctttaatattaggcttgcaagtttttagatgaaaagtggaatcccaagtttttggtgattgttgctcaaaagaaccatcatactaaattctttcaacctggagctcctgacaatgttcctcctggtatgcatcttgtttattttgaattttaacacgtttcaataatttttgttttgttatttctttactcttttatttttgcaggaactgtaattgataacaaaatttgccatcctcggaattatgatttctacatgtgtgcacatgctggaatgattgtgagtatctgctattttttttaatgtggttttggttttacaatttgtagttccattattgtggctcctatccttttgttgatgtaaagtgcacaaatgttctttaagacgcatgtacattcatttcacatggtgaaattgtttccaaattgaagtcgaaggtttctggcttctttccttcttaatttaatgtttatgtatgttcatttgcatgcctctattttttaatatgttagtttttttttttttnnnnnnnnnnnnnnnnnnnnnnnnnnnnnnnnnnnnnnnnnnnnnnnnnnnnnnnnnnnnnnnnnnnnnnnnnnnnnnnnnnnnnnnnnnnnnnnnnnnnnnnnnnnnnnnnnnnnnnnnnnnnnnnnnnnnnnnnnnnnnnnnnnnnnnnnnnnnnnnnnnnnnnnnnnnnnnnnnnnnnnnnnnnnnnnnnnnnnnnnnnnnnnnnnnnnnnnnnnnnnnnnnnnnnnnnnnnnnnnnnnnnnnnnnnnnnnnnnnnnnnnnnnnnnnnnnnnnnnnnnnnnnnnnnnnnnnnnnnnnnnnnnnnnnnnnnnnnnnnnnnnnnnnnnnnnnnnnnnnnnnnnnnnnnnnnnnnnnnnnnnnnnnnnnnnnnnnnnnnnnnnnnnnnnnnnnnnnnnnnnnnnnnnnnnnnnnnnnnnnnnnnnnnnnnnnnnnnnnnnnnnnnnnnnnnnnnnnnnnnnnnnnnnnnnnnnnnnnnnnnnnnnnnnnnnnnnnnnnnnnnnnnnnnnnnnnnnnnnnnnnnnnnnnnnnnnnnnnnnnnnnnnnnnnnnnnnnnnnnnnnnnnnnnnnnnnnnnnnnnnnnnnnnnnnnnnnnnnnnnnnnnnnnnnnnnnnnnnnnnnnnnnnnnnnnnnnnnnnnnnnnnnnnnnnnnnnnnnnnnnnnnnnnnnnnnnnnnnnnnnnnnnnnnnnnnnnnnnnnnnnnnnnnnnnnnnnnnnnnnnnnnnnnnnnnnnnnnnnnnnnnnnnnnnnnnnnnnnnnnnnnnnnnnnnnnnnnnnnnnnnnnnnnnnnnnnnnnnnnnnnnnnnnnnnnnnnnnnnnnnnnnnnnnnnnnnnnnnnnnnnnnnnnnnnnnnnnnnnnnnnnnnnnnnnnnnnnnnnnnnnnnnnnnnnnnnnnnnnnnnnnnnnnnnnnnnnnnnnnnnnnnnnnnnnnnnnnnnnntttttttctgatcatcctcgttattcatttcactgaatactgtttatttagagagtaggaacccctttgtacgagttttccataaatgatatgtttgtgtcagaacttcaataacatgcttgtatttctttgaaaaattactattcagggtactagcaggcctacacactaccatgttctgttagacgagattggcttttcacctgatgatctacaggagcttgtgcattcattatcatatgtgtaagtagtagttgtgatctatttgattgttttagaatattgtttatgccaacccttgccatatatcgatattgtcttaaaatcattttgctatttgacaataggtatcagaggagcacaactgccatttctgtcggtaagttcttgcacaacatttttagcattgtgtttacacttttatgttcccaatttatagaaatatatagggtctcattggtgaaaaaactggatgtatgcagttgctccaatatgctatgctcatctggctgcaacacagatgggtcagtttatgaaatttgaggacaaatctgagacatcttcaagtcatggtggttctggtatgcctgctcctcccgtccctcagttgccaagattgcaggataaggtttcgagctcaatgttcttttgttgaaggatctattgcagttctagggataggcgatgactgataacagtgctgtttataagaccttcataggatttttttatttttttttgtggaaacagtttaactatgggcgccaatggtagtaggaaaggattattatacatgtaagaaggcattttgctcatgcctttacatgtattttgaatattgttgcgaagtctttcgctattttgaagattgttaaggtttatgtgattcctatggtgttcctattatgcactcttgatcattatctaatctagttgtggtttgcatgaatcaaaaagatcaaatgggtattactgttcttgttaaagtttgtttgtgatctgtctgttatttacggataaaatccatattttcgactcctgatagcaatgtgacccgagttaataagaatgtctcagttgtgttaaaaataggtatattttcatcaggattttgagatcaatgctagttacgtgagtttaacttggttatttatttttccgcagttaagttattttcttttattctggtcgtttaaattacatagaaattggaacattcatgcagtatccacagaagaaaaaaaattgccttctatttgaaccgaatgagaaagttaaagtatatagaagttttatacagtttgaccaatattctattattcagttcagtttagatttttgtgttattctttaggatatatatttctttttgtataaaacagttttattttttgttccatgatatttttttcatctttattcttcattctgctgataatctaaactgaaatattaagtttaattaaaaattaagttgactatttcaaattcttttttagaatatgaacatttttttaatagaaatttacttttttaattaacttttaaaggtacttgaatcaatatgatgtttctgccaaaaatatcaacatgacagttttttagaatatcaacatttttacatgttaaagttaatttgttcgtgctttttgtaagtaaaaattctgcaaaaaaatatcaacattcatatgaaatttacatgtgttaagaggcaagctaatgctatggctcattctaggctaaagctaggtttccagtacattccatcgtgtattcttcactagcctattaatgaaatgcatgatttagttctcgtaaaaagtcaaaatcaatatgaatgttgtatatacctctttcatgatttcctattgacagatatgagtgacattaattcttgaaaatgataaatatgggtagcatttaagaatcttaaaaatggagatagaatttttgcattttctctaatattttttaaaaatcaattttaaaattactttgtgaacaataattaacaatgcatgtatcatagagaaaaaaattgatgacgtgaagagttacattgacataaaataagttggatatactcaacctctaaaaatgaaaaaaaaaatatttaaaaaaatttaatttattttgtaaaaatttaaaagtaattccttattttttcttatttacctgtgtggtgcatctttccgtttcgttgaatcctgatccgtaaaaaaactaggctccataaaacttatcagtttttgacaaacatagtgcatgagaccaataatcccttgacaacagcaccctataattctgcttgtgttaatatccctccaagagcaatgaacccataccattgaccaatgtacactgtttcccgtgctgctcaaacgcccaccagctgtttgacctaagtccatgccaccagttacttcaagaaaccacatctaccagttgtgggaatattaagttgcactttacttgatttacagttagtgggggaccacatcatggccttgttttgttgatttgaacccttgcaagaatgctcataagaaatttacattgtcacaaagtccattctctgagcctaaggtgctttacttctgcaactcctaatgtacttaagcctggggatgtcttgagaaaagcaagggtttatactgaggaagatgttctccaatactccaaggtgagttgtgattctaatcctttgcatactgattctgctgctgccaaagatgttggatttgaaggtccactggtacatgggatgcttgtggcttctctctttcctcatatcatctcatcacattttgtaagtttcatacttaccctctctttaaattttgatatgcctcctaaaatgagatagttaacgttctcatctcaatattaaattaatgtgaataaacagataaattagtagagttctattattagttttctagactgaattttatactctgttctctgtagcatacatttttacatgtaaaagttaatttgtttgtgctttttgtaagtgtgaaatttctgccacagtcagcagctttggggaactctaagttgattctgggtccaaatccccttgcccccatgaacatcctttctgtaaacttgagtattagacaccataatggaaaattatgacatgagatagagtatcataaaatgaagacggataagatatgaaattgtaatctccactataaggagtgtgaaataaggtcaagtgacccctcacttattgcatagattaaaatgtgtcatgattaatcagaagtagaaagggagacacatgtaaaaagcttaaattttatagtatttctgaaagacatgaaaatataaacatggataaaggacttatcgtgtgtctggattggcattatgtcagtgtgatccgcgtccttttgaagtaaatttttttagcttccacattaacttggcatacttgacgtgaatttggttttggatgtggttggaaaatgcaaatcaccaacatgctattaagtggtcaatttaaatgctaacatgggttctagttctactgcttgaaaaattggtacttgtcattggatttggtcaacttgaataaaagacttgattttaaagtgcttgataaatgatgtgaattgaggcaatgctatgaagtcattcattgaaatattctcattctgtgataactttcttaaattcctcttcttccctggccacttcaatcttcaataattgcagcctggagctgtgtatgtatctcaaaacttgaattttaagttcccaatctatattgagatcagattattggtgaagtgcaagcaactaatctgagagaaaataaaaatcgatatctgtaagtttagtcctgctgttattattgtgcattcttttttaaacaaggagtaattttgtttctaaatgaatgtttctcaatgctattcagtgcaaagtttaagacaaggtgtttcaagaatgatgaccttcttgtgattgatggtgaggctgtggctttgttaccaaccttgactgtagaacagattcaacacgagaagccgtaaaagatattcactgttcttgactgttaatcgcaaataccttttcaaaggcaatgttggtcataaaagtaatatgtttgttgttttctttctaatggaagtcattggggttctaaattctaatcccctaccctgaacacggacaaacagcagacaccaaaaaagtttttgttctctttgttattctgatgttggtgctgaacagttatgtttgattttttgtgtgcttttttatcatatcacgcaaaagttcacttcattgcactgagcttcaaatcaaacggcacaaagagatcttattgatatttttttttgtcttttgtgccatctaatactattggttttggaggaaatgtttaatgtagtaacaagttagattttactttgtttcgtgcccatacggtttctctatattttgtattggcaactgcctcgcatgaaatcaaaaaatatggtcccttattaatcctgttgttcttccctctatagggttcatttaaatccaacatttgcagtagctatttacacaaaactaatggaaaatttgctttgttggtaagttttaagtaatagcacatgatccaaaattgttgatttgttaaaaacgaaaaaaaaaacattaaaattagttcatgataaacaatctctcttccctttttttcttttatctttttctcaagtaataatgtttggcattactattataatagtagtatgtgcgaataaattctttatttatttttgtgtacgatagcgggacaatgaaatttgaacttacaacttcatataaactatctagaccacaccactaggccaaacaatttattagtaaatttaaaagataccttgaattccatagtttaacttaccatcacacaaagtaaaatcaatacaacaattacaactggtgcaatagtacatatggcctatcatttctagtaactggtgttatcagaagagatatcccacatcaagacaaagattaacaccaaaggtatttggttgacttgaatgccatctgaagcacaaccactttctggtgaaggtgctggagcaccactttctggtgaacttgctggagcaccaccttttggtgaaggtgctggagtgggtgcagcaacaccttcagtaacagatatagcaaccttcatcccatgccaacaatagcctcctccacttaagaatagtaggtcttgaattcagttagatgaaacacgtctcttcttgcaccccttgatatgttatgaacaaatcctgtgtccatgtaattctcataactaagccttgttcacctctagtacattgtactcgttcctatcatatccaaagtcttgcaagcataacaacatctaagtcatagtcaaaagataaagtataataatctacattaataaattaatctacaattatatgtgccctttttaatgacttggactcctttttctcgcttctacattaataaatttagtaaataattaaaaaaaaatatttactaaatatattgttgtaattacgaattcaagaacttgccgcaaactaaaaaagcttagaaaaattgaaatataagttaaatttaaagaaaaactaaaatattttaaaatgaatttccttcaaatatattatttacttatttcaataatgttattctatttaatgtaatgataatataaaaaataatatttttaattttagaaaatatattatttaaaaacatgtaagacctcacaacaaactacataaccaaattggttagatttggttaatgacctattctaattaattgtatactagtgatcatttgttaattgataaaatttaaaaataatattttatattaaattactcaatttggttagataatcttgggtaggttagttaggaaatccattaattaaaatgtattattttgattctttatgttttttaaatgtatcattttgattattttaaatttaaaaattaatgaaatattaacgttttaaatgaaaaattgaaagaatgatcaaaacaatatatttcaaaaacataaaagaataaaataaaatttttaaaacttgatatatcaaagtaaaataattgtggacataatgaactaaagaggaaaacgaaaaaacaacacgtgattgaaaataattatttttctgaaaactctctttaaaaaacagcaatagaaaagtaattccaaagaggaaacaagtgggttggttgtcagcggtgaacttagacatgcagtgggtgcacaccacaagcgcaatatcagaggaaggaagcatgcactgcatgcatgtacctacccttttcaattcaattatgcatcattctatcattctacgtctctctctctctctctctctctctctatatatatatatatatatatatataattatccactcttcattggatgcaaggcaagccgtggtggttgtggaggtaccaaagttgggaaaagaggctgcaactaaggcgatcgatcaaggaatggggtcaacccaagtccaagactacccatctcatcttttgcaccaccagcggtgtcgaaatgcctagctttacatgatgtaccaacaaggctattgtttggagatggtgcaccatccttccatacagttggactcactttccatcccctcaaggatgttcctggactcatctctaagaatatcgaaaaggcactagtgtaagcctgaaaaaatggaagctactagacatttgctcagcgagtatggtaatatgtcaagtgcatgtgtgctattcatcttggatcagatgagatgaggaagaagtctttaaaatttattataaaaaatacaagtttacttttccttttaagaatgaaatggattgtaatattattactaaaagttggtcacgacctgcacatcaaagtcaataaaagaaagtaattgatgagaaaattccaatatctaatccatgtacaaatatcaaaatccctaattacttgataagttcactactcttacaccttacaccagaccacaacctatgctaggattaaagaatcatactactacggtgaaaatattacagatagtacagcttccagcaagccttgtattccaatgtggtcatcaccatattcaaatccactaagttgaagagtcgggctgtttgatgaattcacatgcaatatttgttgattttcatgaacttgttgatatgcagaatcaaatccactcatttgatgagtcacgctatttggtggattcagcggcaacttttgttttttttgttgcatttcgtgaacttgttgaattccagtaagaggaattgaattttgtggatcaatgatgtgaggaactccatttgtgtaatgtaagtttttatcatgaatgctttttctttttttctgcatgggtgaggcattttggcgaatgaaatacttttgggcatgactggcaatttgagtaggggatcttgttttaaccaaccttgatatttctatccagtttcccttcccatgtttttggagcccaagtaaaaacaacctgccattaaaaaacaaatatgagaggaaaaatcgagaaacttccattcatttgatttctatacaatatattaaaaacctacctatgttcttcttcagtccatgtattccttctcccttgcttgcgccgaaccgatgaaccagcgttctgcatcatggaaccaccaccgttatgcaccagcgcctcaactgggtggctgggcaactcgaccggagcccacgcaatctggttcacgtgattgggcaatgtctggtggtgttgggtgtcctccgcaactagggttgcaacgttcagcggtgtctggtggtgttgggtgtcnnnnnnnnnnnnnnnnnnnnnnnnnnnnnnnnnnnnnnnnnnnnnnnnnnnnnnnnnnnnnnnnnnnnnnnnnnnnnnnnnnnnnnnnnnnnnnnnnnnnnnnnnnnnnnnnnnnnnnnnnnnnnnnnnnnnnnnnnnnnnnnnnnnnnnnnnnnnnnnnnnnnnnnnnnnnnnnnnnnnnnnnnnnnnnnnnnnnnnnnnnnnnnnnnnnnnnnnnnnnnnnnnnnnnnnnnnnnnnnnnnnnnnnnnnnnnnnnnnnnnnnnnnnnnnnnnnnnnnnnnnnnnnnnnnnnnnnnnnnnnnnnnnnnnnnnnnnnnnnnnnnnnnnnnnnnnnnnnnnnnnnnnnnnnnnnnnnnnnnnnnnnnnnnnnnnnnncaacctgggtagcaacgttcagcggtgtctggtggtgttgggtgtcctccgcaaccagggtagcaacgttcagcggtgtgcggtggtgttgggtgtcctccgcaacctgggtagcaacgttcagcggtgtctggtggtgttgggtgtcctccgcaactagggttgcaatgttcagcggtgtgtggtggtgttgggtgtcctccgccataggaatctgggtagcaaagttcagcgtcgaccatatatcatcgcaatcaaaaagcagattgtagtcataaacatcatcattccaatcgttattatagaactcagacattgttttcttcttttatggctttcaaagtttgaagctgcaaactcaaaatgcctttctttccgttcacagggcttcttatttaacaaagcatgacgcgctaaaatttggcgcccaagtgacactcattattctttaaaatttgaaaaaaaaaaaattctttcaaagttgcttacccaaagatttcaaaattattaatcataataaatttacttatccaaataaatgagaaattatagtaatacatttttaaaaagttattttaaacacaatatttattattagttaaaatttattagaggtcacaaattttatgatcctacttctcatttaaaaactttttttcaattttataggttttaataaattttaactaatattacttatgtgttataaatagtgtgttaatattacttatgtgttataaatagtgtgttagggagtatattattaacatttctctaaataatatacataatatattattatataaattttatcatcatcttttcaaattatatgtttattaatttattaaagtttaaatttacataattatattaattaacttatttataagtaatttcataattttatttgttaatattatcactaaaaagtgagattttaaataattttttaagaagtataagacttaaactaaattttaaaataatttatataatataattaaactaaaattaactcttatatttcaattaacagattagtcacaaatctttcaaaatcgagtcgaccaaagttgatttccttcctacccttacactgttatttaaataaacgcactgcattcgtcaatattcacctatttttatttgaaaatctcaaagttgacaaaaaaaatagatttaaaccaattaaaatatttcaaatgattgaatacaataagattttttagatatttcaaaatttatcaatccaaaaaaattagattgatttaattaagtaatttgattgattttttaatttttaaacaaaatatattttagaatttatttaaaagataaatgaaatattaaaaagtcaccaatattactaaaaaatagagaggaaaaagcatgatttggtattaggcatgacaccggaatctgaccccgtggggatcgaatcgaactctccccgactttgacggggaaaaatcaagtcgaccgggttcggggtcggagtcggattttccctgttaattaaaacggggggggggtatgggataactgatatccgccctgaatcgccccgtaataaataacattaaaaaaaattatatttaagttgtttctttttttgttatgtaatttaaaggatgtgatacttaatcatatgatgtgctacttaatttttggacaatatatatttaaatgatatcgtatttgtgagaaattaaatatgcatgtccttattttatgcaataactatattttatgattttaattaaactaattgatttggttttgtaatttttaattatgatctcattctcatattttgaatgtgaatttattatttttttttgttatgtaactagcatttttggcccattttttcaataacaaaagttatattatttttctaatttttttaattttaattaattagcgagggtggattgagacgggaaaatcgaccccatccgggatggggtatatatttttaatcccaatagggatcagagagcggttttagagtagagggcggggatgagaaatgcaaaacccatcctcgttgtcatgcctagtaaaaataataaattagacaacaggatttttttctaaacaacaaaaagatgattttttaaattgaatgaaagagtaaaaccgaatgtcaaataaaataataaggataaaattaagagagaaaaattaaactataagctaatttattttttataaactacttcaaataatttatgaaaataagtcactaaaataaacttgtgtagcaaagtagtttataagataattaccaaatcaaagaaacttaagtattaattacaaaagaaaaaaaatactcaaaatagcctatattattgtgtatcaatatttttagaacataaaaagtaatttattgaaacagaattcaataacatcaaattatcttaaaatgtatctaataatatattgttataattaagaattcaaatttgacctcaaattaaaatgttaagaaaattctgaaatataaaaatttaaaaatatataaaaaagttatttaaatatatgattttctcatttcaatgatgttcttgtattttgtgcaatcagaatttagaaaataatatttttatttttcaaaataatgattttgttttaaaaagagaacacaataaattaagaaacaagaatacttgatatagggtaataagagcatctccaatggaaagtgcttatatgggtttcttagagtcatttattcatctttgttctcaccgtttataaaatttggaaactcactgacatgttttcattggctgcgatgctactaaacaggcttgacaaccaccaaaactatgttttcaacttttaaactcgattctattactttaacattaaataattttttggttctgtcatgaatatctccatttcagtgactaattttacttgctataaacattaactaatatttttttatcaagaaacatcaaataatttttttttctcttgtctcatttcttttttttcttagcatttgtttttttttttttaactttttcatatctaatattgagttcatctaccaccgattccaattaacttaggttaaatgtgatgttgatgatgatgaagaaacatcaaataatttaaattcatttcannnnnnnnnnnnnnnnnnnnnnnnnnnnnnnnnnnnnnnnnnnnnnnnnnnnnnnnnnnnnnnnnnnnnnnnnnnnnnnnnnnnnnnnnnnnnnnnnnnnnnnnnnnnnnnnnnnnnnnnnnnnnnnnnnnnnnnnnnnnnnnnnnnnnnnnnnnnnnnnnnnnnnnnnnnnnnnnnnnnnnnnnnnnnnnnnnnnnnnnnnnnnnnnnnnnnnnnnnnnnnnnnnnnnnnnnnnnnnnnnnnnnnnnnnnnnnnnnnnnnnnnnnnnnnnnnnnnnnnnnnnnnnnnnnnnnnnnnnnnnnnnnnnnnnnnnnnnnnnnnnnnnnnnnnnnnnnnnnnnnnnnnnnnnnnnnnnnnnnnnnnnnnnnnnnnnnnnnnnnnnnnnnnnnnnnnnnnnnnnnnnnnnnnnnnnnnnnnnnnnnnnnnnnnnnnnnnnnnnnnnnnnnnnnnnnnnnnnnnnnnnnnnnnnnnnnnnnnnnnnnnnnnnnnnnnnnnnnnnnnnnnnnnnnnnnnnnnnnnnnnnnnnnnnnnnnnnnnnnnnnnnnnnnnnnnnnnnnnnnnnnnnnnnnnnnnnnnnnnnnnnnnnnnnnnnnnnnnnnnnnnnnnnnnnnnnnnnnnnnnnnnnnnnnnnnnnnnnnnnnnnnnnnnnnnnnnnnnnnnnnnnnnnnnnnnnnnnnnnnnnnnnnnnnnnnnnnnnnnnnnnnnnnnnnnnnnnnnnnnnnnnnnnnnnnnnnnnnnnnnnnnnnnnnnnnnnnnnnnnnnnnnnnnnnnnnnnnnnnnnnnnnnnnnnnnnnnnnnnnnnnnnnnnnnnnnnnnnnnnnnnnnnnnnnnnnnnnnnnnnnnnnnnnnnnnnnnnnnnnnnnnnnnnnnnnnnnnnnnnnnnnnnnnnnnnnnnnnnnnnnnnnnnnnnnnnnnnnnnnnnnnnnnnnnnnnnnnnnnnnnnnnnnnnnnnnnnnnnnnnnnnnnnnnnnnnnnnnnnnnnnnnnnnnnnnnnnnnnnnnnnnnnnnnnnnnnnnnnnnnnnnnnnnnnnnnnnnnnnnnnnnnnnnnnnnnnnnnnnnnnnnnnnnnnnnnnnnnnnnnnnnnnnnnnnnnnnnnnnnnnnnnnnnnnnnnnnnnnnnnnnnnnnnnnnnnnnnnnnnnnnnnnnnnnnnnnnnnnnnnnnnnnnnnnnnnnnnnnnnnnnnnnnnnnnnnnnnnnnnnnnnnnnnnnnnnnnnnnnnnnnnnnnnnnnnnnnnnnnnnnnnnnnnnnnnnnnnnnnnnnnnnnnnnnnnnnnnnnnnnnnnnnnnnnnnnnnnnnnnnnnnnnnnnnnnnnnnnnnnnnnnnnnnnnnnnnnnnnnnnnnnnnnnnnnnnnnnnnnnnnnnnnnnnnnnnnnnnnnnnnnnnnnnnnnnnnnnnnnnnnnnnnnnnnnnnnnnnnnnnnnnnnnnnnnnnnnnnnnnnnnnnnnnnnnnnnnnnnnnnnnnnnnnnnnnnnntttattaatttattaaagtttaaatttacataattatattaattaacttatttataagtaatttcataattttatttgttaatattatcactaaaaagtgagattttaaataattttttaagaagtataagacttaaactaaattttaaaataatttatataatataattaaactaaaattaactcttatatttcaattaacagattagtcaaaagtctttcaaaatcgagttgaccaaagttgatttccttcctacccttgcactgttatttaaaaataaatgcactacattcgtcaatattcacctatttttatttgaaaatctcaaatttgacaaaaaaaaatagatttaaacaaattaaaatatttcaaatgattgaatacaataagattttttagatatttcaaaatttatcaatccaaaaaaattagattgatttaattaagtaatttgattgattttttaatttttaaacaaaatatattttagaatttatttaaaagataaatgaaatattaaaaagtcaccaatattactaaaaaatagagagggaaaagcatgatttggtattaggcatgacagcggaatctaatcccgtggggatcgaatcgaactctccccgactttgacgggaaaaaatcaagtcgatcgggtttgggttcggggtcggggtcggggtcggattttccctattaattaaaaccgggggtatgagataactgatattcgacctgaactcgtcccgtaataaataacattaaaaaaaatatatttaagttgtttctttttttattatgtatttgaaggatgtgatacttaatcatatgatgtggtacttaatttttggacaatatatatttaaatgatatcgtattttgtgagaaattaaatatgcatgtccttattttatgcaataactatattttatgattttaattaaattaattgatttggttttgtaatttttaattatgatctcattctcatattttgaatgtgaattttttattatttttttgttatgtaactagcatttgtggcccatttttcaataacaaaagttatattatttttctaatttttttaattttaattaattagagagggcggatcgagacaggaaaatcgaccccatctgggatggggtatatatttttaatcccaatagggatcggagagcgattttagagtagagggcgggaatggggaatgaaaaactcgtcctgtctcgttgtcattcctggtaaaaatgataaattagataataggattttttttctaaacaacaaaaagatgatttttcaaattgaatgaaagagtaaaaccgaatgtcaaataaaataataaggataaaattaagagagaaaaattaaactataagctaatttattttttataaactacttcaaacaattaatgaaaataagtcactaaaataaacttgtgtagcaaagtagtttataagataattaccaaatcaaagaaacttaagtattaattacaaaagaaaaaatactcaaaatagcctatattattgtgtatcaatatttttagaacataaaaagtaatttattgaaacagaattcaataacatcaaattatcttaaaatgtatctaataatatattgttataattaagaattcaaatttgacctcaaattaaaatgttaagaaaattctgaaatataaaaatttaaaaatatataaaaaattatttaaatatatgattttctcatttcaatgatgttcttgtattttgtgcaatcagaatttagaaaataatatattttttttttcaaaataatgattttgttttaaaaagagcacacaataaattaagaaacaagaatacttgatatagggtaataagagcatctccaatgggaagtacttatatgaattttttagaatcatttattcatctttgtcctcaccgttcataaaatttggaaactgtggcatgttttcattggctgtgatgctgctaaaccggcttaacaaccactaatactatgttttcagcttttaaactcgattccattacttgaacattaaataattttttggttctgtcatgaatatatccatttcagtgactaattttacttgctataaacattaactaatatttttttatcaaaaaacatcaaataattttttcttttctcttgtcttatttcttctttttcttagcatttgtttttttttttttaactttttcatatctaatattgaattcatctaccaccgaatcaaattaacttaagttaaatgtgatgttgatgatgatgaagaaacatcaaacaatttaaattcatttcatctgacactgcatataattgtttgtaccttgccttttatctttttcacagacaatcattccaaaaatactctcccaaaattaaaggagacaacttgtcccattttagttgtaccaaaaaaattttgctttttaaaccataccaataacaatttggtaagacaataattgttacatataaattaaatgagcacgccaagttacaaagtaagaagattctcactcttattgttcaaatttggcaaagatataagtacaaccctttccccccttttaacccccaccaaaaataaaaacaagaacctctttttcttatgctgtaatgtcacaacttctagtctatcatcttatgtacaacatttggagaaaagaaaatgtgtctctcaaagtttgcaagatccaccaaagaaaggatgcagtggtattataccatatagaatgatccatcaaagaaacctgaaaagacttggctatcagcaatcctcttgatgaggcataatcaactccaccaaatatagagaagaaacaaataatcttctttcaaaaagtaggccgctactccacaacaactcattgttatgttgttaagagttctcatcaaaattggggatgccatcaaaactctgccatatgtatttaccatttggacatatcactcaacttaattgacatcctcttttaccatactctttactttggcacggaaatcctccaaactaggatactcttctcgaagcaacctgtccagttcagggtgttgattcaatggttctttttggccacggaccttgcggtaatgatgaaatgccctgccaatgccataaatataaatataaatatgtaagaacaaaagttctagagagtgataatatggtgaagaggagtgccaaaacaatagaagaaaactacatttctctatatctaacagatatgagggagacagtgccttgccttagaatatggcaacctccattcacccaaaaatatagaaatgcaatactaataaaatagtatgctagcatttgacatagaaactaacatatttgcaatatgatgatctattttggattagctaagcataggtaatctagtgttataacatgcacattcataacatttagaactgctcatactgttccacaaatctaccatcaagaataaacaaaatgctccatttcagtccaataatgcagtcaggaaatatgttataaagattttgtgacacaaacaagtcagacaaacaggaaataatcaaatataactaaggtactgtataattagatttcatagaccagtgaacaatctttttaatctagaatacaactataacaaaccaatatgtttacttctttcactataacaaatctcacatgaaattgggaaaaggaatgaaactacaaaacagaaaatatgcagtagaatataagaagtaagagaatttggttttttaccaatatttttccaggccatacagattgcccttatggtagaaatccagagtgagttgttcaaaatcattgtataaatcatctctaaattccttctccaatccataactgagcaagaaatcattcaaaaattagaagaactatgcttggatgtcttctaaggaaaaataaaaataaaaatatacaacataaagcaatttaatcagcttctccaaagaaacaatagatgaaaattcagaagacttgaaattagcctattactttactcgacaaaatggaccagaagatgaaatctaaatgatggttctatcttctcaaacaaatgagaaaagaaaaatttggaattgatacctgtaaaatctgaaaaggcactctataccataatcataattagcagcagcatcttccttagctaatttcttaaattcattatacatagaaggcacaaacatgtctcgaagaaaataggaccagaatctgtataatgtattcatttcctgcattgacacacaaaaggaggagaaagaaaaacctaccagaataagcaagtgtatgattgaaaaagaatataatacaagaaaataaaaatattaaatttgcaaataatatgaaaaccgaaatgtataaaaaaatatgaatgcataatatacaaagtgagctaatgaagatgacagcactgcatccaggctcattttgatatgaaagcttcggctaatgacattgttaagttaaaaagagaaagttgaccaatgcaaaccaatattgaaaatgccacatgtcataactattccacaattttcactcgaactattgcaacatactcgtacacaaagtattttagaagataagtcattcaattaacaaattaagtaataaaaaaggcaggcaatatattaaaagtaacaggaacagaaattgagaccgagttcaatcggtgggctaccaatgtggttctttacaaatatttttcatagaaacgtaagaaatggagttcacctcgctgcaaccaattccaagtttctttctatcattcaggcaccgtttgtgatacttcaagtacctgaaaggaagaatactaacatgaggaatttttaaaaagcaaatcctatagggctatatcctagtaccactctcatgcatacaaccagtaagcattatcatttacttctgttgtttgaaaccgttttcttctaaaagttggtgacttggatgctgaaacggtggaaaagacgttggcattgaacccacaggcggactaccagcgaaacccccatgtggactaccagaaaaccccccatggggactactagaaagacccccatgtggtgaactactcaatttggaaggcttgaaactgcaaatttaagataattaatggaaatagcttcagttgtcaaaccaaacaatcaacatgtcatatcatactctctgaaacagtaataatttatattcttaatttaacaaatcatttactatatattcttccagtaaaggataaaagtgagaaaaaaaaaaggctggctaagcaaaccaatattacagtcattagcactgggaacaatcattttgaactgacccgtgattttcaggaggcgtagaagcaaagaaaaacccaaccgaattactaggcgggctttcagatatgattccatgagagtttcgaccagttccatgatttctaaaattacttgagaaaaaccgctgcttaagggaagatggttgcttgtgaaaaactttttgtttccttcgggaattatagcttccagactcttcaacactgtttccaccaatattctcaactgcctttatatttgatgcacccgaattatggcttggagattttatgtttcgatctctgctatcagagttattctttctacgattagaccgcctatgtttcagttcctgtagataatgggtggggcaaccaaaaatttaataaagatgatgatctgaaaaataaaagacaacaggggaaataagaatagtgactcaacctgctcgtagaagtaaagaccatcatttattgcggaagcaagctcattggaaatggatattgattctttactaccacctctagatctttgtttaggatcaccattctgtacattagaacgtagttattagaatcttacaattcatgatttgaatcctacgttcaatacgatacatctatctatagattgtatcataagatgaatctcatttcattcttttcttctttacctttcttttacctattcacgtgaaagaaattgtgaagtcatataagcttaaattgttaaatggaaaggaatatcatgagcacttacaaacttatcctatttgattattgcacttattttatttgtcattcattcaatgcatgcactctatttggctatttcattgatttgttttcattcttctaaaaatagtaacttcacaaactaattttgttttataagatgtttgattaagtcgtttttatctattttaagtttaaactattacattaagttatttttcattgtctctgaatccgatttgatgcaaataatgattcacgatttgaacctaaatttgataaccttgcattaaaatataaaattattaaataatcaattaattgtaattaacattctaacatattatggttaaatcagttttnnnnnnnnnnnnnnnnnnnnnnnnnnnnnnnnnnnnnnnnnnnnnnnnnnnnnnnnnnnnnnnnnnnnnnnnnnnnnnnnnnnnnnnnnnnnnnnnnnnnnnnnnnnnnnnnnnnnnnnnnnnnnnnnnnnnnnnnnnnnnnnnnnnnnnnnnnnnnnnnnnnnnnnnnnnnnnnnnnnnnnnnnnnnnnnnnnnnnnnnnnnnnnnnnnnnnnnnnnnnnnnnnnnnnnnnnnnnnnnnnnnnnnnnnnnnnnnnnnnnnnnnnnnnnnnnnnnnnnnnnnnnnnnnnnnnnnnnnnnnnnnnnnnnnnnnnnnnnnnnnnnnnnnnnnnnnnnnnnnnnnnnnnnnnnnnnnnnnnnnnnnnnnnnnnnnnnnnnnnnnnnnnnnnnnnnnnnnnnnnnnnnnnnnnnnnnnnnnnnnnnnnnnnnnnnnnnnnnnnnnnnnnnnnnnnnnnnnnnnnnnnnnnnnnnnnnnnnnnnnnnnnnnnnnnnnnnnnnnnnnnnnnnnnnnnnnnnnnnnnnnnnnnnnnnnnnnnnnnnnnattagatagccgtatagttataacttataattaagtagtatacagagcaatatagttatgtagttcccgcctctgaacatccataaatcagaagaccctcaaattattttaattttcatcaccattgctgtttgggcaatatgaatgtaaaatcgaaacctaatttgaatgataccactttagaggaaagaataaacatatgaacttgattttaattaaattataaacagcaatacctgggtgacaattactagtctctgaacatcctgttcaatgacagccatctcatcatcttcatcatcattccttttagacaacaacttccatcagatgaatatttgaacaaaaaagtgaacatatgatatgcttaatgaaatggcacaaaaatcacctaatatcattccatatgggatgcctaaaataaagacaagtattctaacatctcaaacagaatactaacacagttttaacaaggaggaaaagaggaacctttgaatttcacattatgaagaaatcagtagttgtcttttattaacttcgaagaaaattgtggaaaatatataaaggaacacaatcaagccaagtgccaatttataaatgaaacacttgctgatattccactagatatcaataagataagacattgctgagcaaaaaaaaaaaaaaaaaatcaataagataagacagaactacgaagtaccttccactagaagaaagttcagtcttccttagcatcttttgctcaagctctatctcttcatcgagcataaaagtattgccaaaatcattggaaaggtctcggacatccatgtttccagcctcattattgtcaaatactttgggctcagtttcttgttggctacataaattattattagttgtttcaacatcacagaatttgacaccttcatgtgatttatcattataacgatggctctcattatttttttcttggttcatatgtgaacgttgtaacatatctttgtttggctgattatggtctgcgaaaattgagtcatgaacagcatctttagcattttcttcggaagtctccttcgtcttatctccaacagcatcaatattctcaagagaattgacagcaccatctacaagttggccctgttgaatctgagctgttggtgatcctgaatttcctgaggaaactcgaatccattttgaccaactatcacgttgccttattttatcaccctataaaaataaggcaagttacaagtgaaggcaacgaagaaaatgaaagaacacaaaaaaaaaaaatcaagtagttggaaaagtagcttcaaactttcatgcacttaaagctggctcctatagaactaaaagtgttattctatatataataaatatactacgtatgaaagcaggaagttctaactattagtatctataagctaacaatcataaccatcttcaactccataattcatctatacttcagccataacaaaatctgctttaaactttaaaaagccaaaacaaagatgccctcttgaataacagtaacgaactcgcactatgtaattctcataactcataagctcaacacatctatactacagatgatacaaatgtgatgaacttaaaagaattattctatacttaataaggaaacttaatgcatagttatcaatttcagatagctgtgcatgtcatctaaccctgaaaatttctatagcggtatagcaagaagctagacaaccactattttaaatattaattacaaactaaatttatactgcagataactcaaaaaacaaaacaaatgccaacattaaagaaattcatgataaataataggtcacattttacacacacaatcaccatcaatcttggagcaataagaacatagtaataaagtcaaaaaatgaaagatgatggtgaaattaatatgaaaaaaaacataataaattagatagaaaaaatattagcagaatgtgaattgggaagtctaaaggaagaagaatcacagaacacgggataaaaaatagtcctagaatgtgtgaaggaatagaggtcaaaacagaggtaactttttgtggaatattttacccaaaaaaaaatgatgttccagggataaaaatggtttttttaagtatatatcatggtagcgcggtgatagcatgcaaaaagctgctattgtagacactattgaaaaccactccacttcactatcctgctatagcacgctattgactactatgactcaatgtagacaatatttcaaaactgagttccttttgaaatatagtgaaacagttaaatatgcctattagagggtgagccttggcacaacggtaaggttgttgttatcttgtgatcaaaagtcacaagttcaaaccaaagaatcagcctccctgctagagcaagataaagaaaaaatagagactgaattatctgaattccaaaatcattgttgatattatggaatacaaaacacaagaatttgaattttaataaaggtcttgacaatataatttttgaaaaatcatcaataggatataaatgtgttgcattaaacttctcacaaacatgaaattgcatcccattactctaaaaatattttaaaaaaatattcatgtacaattcatgacataaacatttgaaactaccaacccccaagcccaagattaatatcagagataaacaagaagaatataaaccatcagtattcagcttaggggcgaaagtattttatgcaacaaactagattctagagttaatgagaaccttagccctgtctacacccgcaagcatgcagtaaatagtaaataactaaaccaagaaaagaaaaattgcctgaacttccacagtattagagctctcaagtgcatcacggataaaaggtatgtctgtgctcatcttcttgacctacaagataattcacatcatataaggcaagtgagaaacagggactaacatggaactcaccaacagaaaacatctgcaaatatatattacatttgggaggaaaaaaatgctttggacacatacccttttaaaatcagcaacagtggatatgggaacccatccttggtcatccatcaaggaaataaggtaatggtcattctgcagattttcatcactgccaaaagaaggctctgaagtcagcagttgttgtaaagattatctttattttcaccgaaaatggaatcaacagaaattattactggacttcctaagaaaattctaatgttcattagcttgttcctgttgctttaacaatctgaagcccaaacactacaaatcagttccacttcatcatctctggcaacaatcctatccaaaggctaaatttatgcaattatcctaatctaaaagatatgggcttggcatctatgaatctaatagtacagcactttgcaataacaatatacataataacagtatattgtcactcaatcgaaagttggaaacatcattctcacaatatagattagcagatgtcagattaaaaaaaaaaacagattaagatcaaatatgatatagaagccagggtcaacaatgaaattacttacctaaaataatagtctatctgttttacaatactagtcctcaacgatacagtttctggaggcggtggctgaggtgtgggattgacaggatatgggacaaagtgcctaggatggggtcctctaatggagccaggaggtggcatggggacacaccaaacgggtgcaggtcctatccaaaagataaaaattggattacaaaactaactgatggagaaattaaaaaataaaaacatcagagaaaaatccttacacagctttcaagttgagaaatccacaagtgactgggaacaagaggaagcatagatgtatgtgtgtgactatgtaattgcacaactatgtgcataaattagaggactatgaattggaattttacctgggaagcttggaccaaccatgtaccctggaggtggaccataaaatggaggtcgtataaatggccttgggcccaaaccatgttgcataggaatgtttgctctggaaggaaaaggtctttgatgatgccaagcatgattgagatggtcaccttgttcttggatatttggtcttccattagaaaaattgccaacataggcatttggatcttcctgcaccggaggctgaacatttttgccatcaacagcatgagcaggtggagcaaaagcttgtccgggcgcctgagaaacaggcttcactaaagggttttctgcacccggaaaaggtcctggaccaggtgggaaagcataaccaggaacagccatgtgcggaggcggtaccataggatgaaaaaatggaggaactggttgatgatagtgaattggtacagggaagggaggtgcaccatttgagttacgcttagcacctggcttttgatggcgtgataatggcagcttatgcattgggttaacgtttccagcaccattcaccttcttttgaaaaacaaaccgatgcacgcacaaacaagaaaagatattcaataccaaaaaaggagaactttgttgcattgcatacaactattatttctaccacaaaatcaaaagcatagatgaggaaaaaacaataagcacctaacatatttgtaaaaccataagaacacaatgaaatatactccttatttacatacaatctaatgttaatcagtaaccacaattgtcatgcttgcaatattcaggcttaaatcatgaaaatcgtaacaaacataaatgtccatcctaaacaaataaactttgttataatacaagacgacaaaaacatagatacaaactcaagaacatattacatttccataaatctatgcattacattttccatatcacaatcacaatggtactacacaaagaacatactaacctgcataaaacgaggtctgggagcaatctcaccagagcttgtcacagaagcagcagcagcagcagtctcaagattcttgggtggtctctgtgcatcagagagacgtggccaagactcggtgcccatcatcacagacacatcacctcccttcccatcaacagtaggggtcttccatggagacttaggagcagcaatctccttctgatcctcaccaatctcattctcagcagtcaccataactgctttttttttctctcaccaatccacccaactcccaagatttccacctctaaaccccacttgccaataaacacaacactcaacctaatgggtgctcagagattcaccaaaaacttaaagataccacaagaagattgaaactttacttgccatttgaatcagtgatattgagcacaagaaccctgagccgaacaggcgataatttcatgtgggtgtgctaaaaagggttcctcttgtgaagttttaatgaaaggagttgggtcagtgtgacaacagaagaaaagtgaaagattagggttttggacagtgaggtgatggaatgttatgagtgtgtttggagacagtagcaatgttaacaaacgccaacaaagtgcgagggtaactgatgaaaaggcgactgagggacaaggtttttgactttgtgaatgctcctatttataagaccatatacggatccagaaatttattaaaggatgagctaaaaaaaattctctctctatgcaattatttaaatgtttaacttttaataagtaatatttttttaaatttattttactatttttactcataacatagaaataattttaaatttaaatgataataatcttaacctctatcataaaaataataaataaataaatagttttacataatttattttaattatcattttaaccattatagtaataataataacaaacacaattaattttacattaacaaattttataataataacaacatggataatttattttatgtagtttacattaattaatttaaataaataaataaatatatatatgtaagaaatactaaatgaatggggctcaagctcttgcctctatccctctccattcctcattgtataagacattctttaaaaatttatttatgctgcatacttgtttttatttattttccctcccaacattaataagaagtaattaaatgaataaatagataagaaaaggttaattttgtaataattatacagataatttacaggtttgatatgattatttaaatttctttaggaaaaacgtgaattaattttgaaaaaaatctagaattaagaacggagggattatataggaaagatagttttaccccatgaaatatttattctactactatctgaagcaccaaatatagaaaagaattctaaaaatattagaactatgaatcacatacatcactcaacattcccaattggttgtttctttgcgccatttggaaccagccaaaaagtgtcccccaccaactttaatatcatataattaatgtagtacttaatagtatttgacaatttttctttagaaaagataatgctgtttaggaaagtaaacgatataggagtagattaaaaacataaacagttgagttctatggtgaaggttgaaaacctgtgtttaaatgaatgtgatgtaggtgtatttttcttcttcttcttcttctagttttgaggttccgaaactaatttattattttacagcttttcattgtgggttctttattttgggtacatggggggagggtgggggacgagacttaatgccaaaacaaacgcgctttgaataagttggaaatttatttttgtattgtatttgtacgaatgcttttaattttaaataaatgtaaaaaaaaaaaaaaaagtatcatctacttcccataccaattgaagtacaacactaaaaaaaataacgactgtgttttaaaaaaaaaaatctaattttattagttttgaaatgtatatgaaagcttacagacttttttaaaattagtttaaaaatatatctatataataataacaacaaaggggtacaataatgaattaatgataataagaagaaggatgaaaatggtgatagtgagaaagtggacttaaaaatgacattggggaaagttaatcgggccactcaatcagtaaatcgataggccaccggcaaggttgtctcgttcggacgctatgaatttacagaaaaaatgtgtaaaatgttattaaatatatgaatatgattggcaattataaagttatggtctcaatatggttggtaattcacttattcaaaatataaataaaataaaaaattattatttttgttagtttatttgataaactcaatttctgtaatactagtaaaataaaatattttcaaatcaactttaggttaagttattgatataaaactataggttcgttaactaaatttgtaaacttatattaaaatcttaaacattttttattttcttctctcggtcaactcaccctaaagtagcactatgctgattttcaacaaaaccctccccagccatcttttggcaagattatgatgtgccgggatatatcagactagttcatttgtcattagtaaggattgagatgtttaaatttaaattgatctaaaatgaaaattaaaaattaaacaatattaattctttttttatttatttggatatttttttaaaataattgattagtttggtttgatttacaatatgtttagtttaaaataaataaaaatttgatctatttttatggtaaaaggtttaacatattaataaatttcataaattatcattaataaattttttaatatcttaatttaaaatataaaaataaagtatataaattttaattaaataatattttaataaaattataaaaaccaaaataaatcaaattatcaaatattaattttattttattcaaattttattttaaataaaaatctaaccaaatcaaaatggaaacagccctggtcatccctaacagcgttattcaatgataatgataagtgctggtgttttttattccttcttgtttttattcaaaattataatagaaaagaacaaaaggtaaaccaatcaaattctcgtaggaggtacaaattttcaagtgatttaatagaccgtagcatataaatatgataattacaatactcactagctgttgccttcattaatgtgattggtcacttgttttagttttattaaaatgcaataaataattttaagattattgaatttttataataattaatactcgtctttgatattttaccagctagtgacaaaattatcattttacaaactgtccattgcatactttttttatacaaaatctaccctcccttgcttccaaaaatttccattttccattttgtcactttgtaaaagatggaaaatcagcttgaggatacaaacatgaatttgaataaatgatgaaaaaatggagccaaactttatgggtaaaagtatccacaaaaagagaagataattattcatttattaagatgaaggataaaaacgagtatttacttgtactttttgcggaatttgattatcactaatttaccaaaattcccagtaggaattatgggaatataaagcatttctcatgctatgcggtccaccatgaccaaccaccaaagtatacagatcacgttggaccagctcaaaatgaaactattacatgctcgtccataaaataaacatttctgtctaattatatggtccacgtaaactagcaccgtaaatccgtcgtgagaaaggcaaatcttagcatggagaaaattgaatttaaacccccgtaaccctgttacccttttccaatttcgttgacaagtttttataacgcaaacaaagcacttaaacaaaaaacgggggtaattatttaactacaggttcttccagtaaaagtttcgggggtcaagtgttggaagaaacctaaaatttctaaatcaatgtaacacctcgcccaagatcaactagctcaaatttattgaagctccaacaaaaatgtaacaagacaaagttaagtattcttttggaatattatcagtaatcttcttaatcaccatatcctcaagccaatatataatatcttgatgttcgagagccagatttgcagttcacgcatgtgccaactgccttctcaagctgtgtgatcaatatcagtaggatcttcattataacatccagaatgttaaatagccatcaaaaaaattagtccttgtgagtaaactatgcattttcagtctcacgcaaataaaaacatgaagaaaacattacactttcttagactacagcttttgcccagtttggtattgccttcataagcccttaaaaaagataactgtcttggacaagattttcaaaaacatttttggcaaagcaacttattttggtatgttaagttttataaaatatacttcttttgcagctttaccagatattaactttcaccaaagacagcaatatcaaaatggacctttctccaagaaagattgtacgtaaaaaaaacaaattgaactcccaagcgaaatccagaagcccaacttgctaatatattagaattaaaatatcttcagaaattagttaaaagcttcagaaagtgaacacttcagaaattagttaaaagcttcagaaagtgaaaagtaggcaagtttccgaagattaactttcccagacaataacaaaagaaaagatcatacccatggataactgcaaagatgataacaccatcgcacccatctgatcttctctctgacattcactccaaaccagggtacacttgtatatagtgagagccaaccctcccaccaagtgtggacatttctttgccttagaagtgaatggaaagacccaagctccattagtggatgcagatgacagaagttatgaacatattcaagcttgtttggtagcaaagacctatgtgtctagataagttgccaacaaagttaaacataacatctccactaattaaaaaaaaaaaaaaaaaaaacatgtagaaactaggaaaacaagctaacttacacccaaagaactgagtgcttattttcagaacggagtaaaaagatgaccaaagtcaggtaacaattcatttcaataactgttcaatctttcattcaggaaggagaaagaaaaaatgattttctcgaacaagatccttgaatatagaggggacaagcgagtgaaaggatgatggaaagacaaattatgacaaaagacaatccttgtttaatgttgttcctcatcatacttcatttcactttcaatctcccagccaaaaaattcaatggaaggaaaaaatggttcgcaaaagggatccagaagaaataattgatattcaaatgttacacggaattaataagtaaatagtagtcattacctataaccataaaaaatgactacaacagtagtcctcaaatccccaaagtatattcctatttttggataagaacattatacttatgaaaaagatggtagtagccctcaaaaatcaaggctgaatgccagacacacgtaaaacatgtaaattatactcgagtcagttatgctttgggaagctaaataaaacagaattggacgttcataaggaaaaataatggtccacaacacacttaaaaaattattatcataaagttttctcttccccaaaattcacccgttcctcaatagtccataaaggaatacgaggtataacaagattttaaaaacatgtcaggggggaaatctactaagataaggggggaaaatacaagtttcagaatctggttctttagtaatcaaatagtaactaaaattacagattaaaagatgcatttgaatagtgcctggtacttcagaagaatcagcggagtccaaaactaaatgattgatgcatcttatgagggtatctgcacagtgaatacatagagtaaaaaaactaatttcacaaaaccaagtgcctatagaagaaacacaaatacaaatatgaacttttaaaaggccatacctctggtactgcaaaatagatttttcaagagttattataatgttcaaatttgaactacaatcccattcaaggtaattgtttatgcaatacaaaatcaatattgacagcaaatggtagaagtgttaaacacaagcctaggaatgttaacacacagactatgaatagatcaagaaagttgatggaaatagagctcagagaaaatacaacaaatagttattcataaatcataaccgtagctaaaacagctaagactgagcagtaatcataaagtagcatcactatctatataaaacaagaaaggcacacatgtgagaaacagattaccaaactagacattaacattataactgcaaaacaaaatatggaaagcataatttcatcaggtccaatgcaaccaaacacaattagtatgccacttgggctcatccatgagtgaaagaagcctgactgaatcatgcaattggttaactaattttaatactcgttttagtacacatcaatatcctcagcttcgtgtaattcattatttaccaacaaggggcattcaaagatagggcagcctatggattaacaacaaacaaaaattcacgagccactcacctaatgacccatgtaaggagcaccaggaccaggatgaggtctcacaccactgctctgtcccatttgaggattctggtatccgggttgcattgctggctggttcccataccccatagcaggctgatttgcatacggagcaggcggtcccgcctggttaaccggggcaccgccaagccctccaagcagattcccaagccccaatccagctccctggttaatcaacgcagtcaacgcctgtccaagtgctggattcaacccctgtgccggcacaccagggttgaaaccccccacagcagagcccgagggcgccatcaaatgaccacttccaagcgatggtccaccaccgccagaggaatacttgttcttctccttcctctgataatgaggctgatgatggtggtggtgatgatgagaatgagaatgctgctgatgatgataccccttgctccccttaggaccatcaacagccttctgacaatacaaagtatgcccctcatagttcttatgaggctcttccaaagccttcttagcactctccacagacttatacacaaaaagcgcaaaacccttaggtttcccagtgttcttatccaaaccaagaggaccatcctcaacctccccaaactgtttgaagaattcaagcagcttctgaggatcaatctcaggattcacattgctcacaaaaatcttcctttgggtgtactcagacaccggggtaacattcggcggtggagccggaacggggccggcagaggccagctggcacgaagtggtgcggtttccgatcttcttttgagggtgtttcagcgccttgcgagcatcgtccctgtgcttaaagaggataaaagcgtaaccctttgatttgccggagaccttgtccgtgacggccttgcagtcctcgatctcgccgtatttcccgaacacggcggttagagtatcggcggtggcgtcccagccaaggccgtggacgaagattttcctgtgcgcgggatccacgtcagcaagccggcgcacgctatcgacgaattcggggaacatatccacggcctgcgtgacgagagagtggagctgctcctttgtgaacggttccagaagcttctccacgggctcttcttcgagagtgagatcctcctcttcctcttcttcgttgtttccttcattgctgccattcgcttcggcgtggtttgcagccgctagagtttctggatcctgttgctcttctagggtctctggttgccgctcctcttgttgttcctctgcttcctcttcctcttcctcttcctcttcctcttcttcgctttcggcgttttgcggctcttcttcttcttcctgttttggttcgtcgacggccatcgtgttgggatcttctagggttggttcggggttgggttgttgttgttggtcgagttcaactggctcttggtcctgttgctgtggctcgacaggtttggtgggttcggggtcggaggatcgaagttttcgtttcttagccatggcggcgaggaggtagggttagggtttcgggaattgggggtgttttgattttaatttgatttgcctgaagaaagaagaaagaagaaagcgagatacgattgcgcctctcagtgggatgtgaagtagtagtctatttcaccgacgctgtccggttatttctcagtcagtgtaaatggaccgggccgggccggatctctacttctccaacatgtaatatgttgcaatttgcaaaagatcttaggagagtttttcttttttctttttatttagcaaattacattaatacttcctcacatttttttagattagacaaaataccatctttgattaacatttacaagctttgcttattggattatacgttatactaatgtttcttatttgtatctccaattattagaaattaatcaccattacaccattttatttttgcatttatatttttataaaataatcattaagtaaaaaaaaatgcacatagttaacttccgtatctagtccacgcacaaaggttattgtactggtataatatataaggggatgttaattttttttaacattaaaatttaaaagtattggtgtaggaatagaaagaaaagaaaaagtagtatcctgttcaattcaataaaaactcaagaggtaagtgtaattttttaaaatatgtgttgataatttagctttaacttttatttaaataaaattgttcttgtatgtatttaatgaatgattggatttcatttgtcacacgagtaattacattaggacaaatttattaggatgattaatattttttatgatcattgatttttaatgtataatagctcctagatatttttatttaaatttaatttatacaatatttatataaactatgnnnnnnnnnnnnnnnnnnnnnnnnnnnnnnnnnnnnnnnnnnnnnnnnnnnnnnnnnnnnnnnnnnnnnnnnnnnnnnnnnnnnnnnnnnnnnnnnnnnnnnnnnnnnnnnnnnnnnnnnnnnnnnnnnnnnnnnnnnnnnnnnnnnnnnnnnnnnnnnnnnnnnnnnnnnnnnnnnnnnnnnnnnnnnnnnnnnnnnnnnnnnnnnnnnnnnnnnnnnnnnnnnnnnnnnnnnnnnnnnnnnnnnnnnnnnnnnnnnnnnnnnnnnnnnnnnnnnnnnnnnnnnnnnnnnnnnnnnnnnnnnnnnnnnnnnnnnnnnnnnnnnnnnnnnnnnnnnnnnnnnnnnnnnnnnnnnnnnnnnnnnnnnnnnnnnnnnnnnnnnnnnnnnnnnnnnnnnnnnnnnnnnnnnnnnnnnnnnnnnnnnnnnnnnnnnnnnnnnnnnnnnnnnnnnnnnnnnnnnnnnnnnnnnnnnnnnnnnnnnnnnnnnnnnnnnnnnnnnnnnnnnnnnnnnnnnnnnnnnnnnnnnnnnnnnnnnnnnnnnnnnnnnnnnnnnnnnnnnnnnnnnnnnnnnnnnnnnnnnnnnnnnnnnnnnnnnnnnnnnnnnnnnnnnnnnnnnnnnnnnnnnnnnnnnnnnnnnnnnnnnnnnnnnnnnnnnnnnnnnnnnnnnnnnnnnnnnnnnnnnnnnnnnnnnnnnnnnnnnnnnnnnnnnnnnnnnnnnnnnnnnnnnnnnnnnnnnnnnnnnnnnnnnnnnnnnnnnnnnnnnnnnnnnnnnnnnnnnnnnnnnnnnnnnnnnnnnnnnnnnnnnnnnnnnnnnnnnnnnnnnnnnnnnnnnnnnnnnnnnnnnnnnnnnnnnnnnnnnnnnnnnnnnnnnnnnnnnnnnnnnnnnnnnnnnnnnnnnnnnnnnnnnnactgatatgaagataaaaatatgtatattatgtttttataataatcaaatttaacttatttatatggtataaatatatttttaagctttaaaataacattcatgataacttatttaaaatataatttgcaacaaattttttaatatataaataaggcatgactttatctttcaataaaatcaattataagtttaacttgactctttaaataaattaacatgattaaaatttttaaaaaggcaaaaaaatataagattttaatatattataacaaatttaatataataataatattaacttatgaattttttaataagttaatctattttgcttaaaagacatataatctaatatgtttaattaaataaactttattataagctttgacctgatttattttttttaaagtatgatccaatttaagtacaatgaattaaatttaatttaacttaaactaaagacttagacttgttaattgtgacttgttactcacatcatcaaatgcttatatgaatcccatccgccaatacacaccaaagaaacaaataaagaatattcttacatcataatgatactaatctcgctacaagtatcagaattgtcccttctcatagtaaacgacccttcacattgtaaggatttgtcatatgctttattcatttttgcatacgaaaaacaacatttcaagtaactaaagacatcattatctttcttaaacaagttgattgataagtaatacatgtgttccttgatcattatattttggtttgctagatccttttgggatgcccgacaaaacttgttccctttccattcgaatatgttgaaatagttatttgattttgtccatttattcacccataagtttatacctcacttttcagcctaaatttgaggatacatgtatgattaaatagtaatataagaaattttatatcatcatcaatttattatatatattatttattttatataaataccttagaacatctataatacacaattagataaattatctattctattttgtggatcttaccgtctcatataaatttaaacattttaacaaaaaattacttctatattaaaattgttaaagtgagtattttacttaattttgtaaatcattccgtgcttgaaacatatgtgatttataatataaatgttgttaaccaactacatgttatatatcccatcattcccatgagaagaagaaaagctaaataatattgcttaaaaatgtataaaatagttatctgttatttctcaccagacatgttcttggtctatgtaaagttgttcaacgttctctgttaccaagaatcacacctgaacataataataatcgaatgcgaaatagcttttttccaaaagagagaaactctgtttgtctttaataagattatccatacgagttctaatttagaaagtggagtttggtaattggggagcattgcttttcctttttatttatttttatctattttttcacaatgagagagaatcttatccgaatcccttgtacgtcacgtgacaatcatagcccgttggacaaaaccaaacgagaggcccccttacacgtgtgtcctcgttgccacgtacgaaacctctctcctcagtcctcagcacgctactccacgcgcccactgctgtgcctcttcttcccttgctcttgcgccaattttattttactttttttaagaaaaattagataaacattccttttgctatttttatcactatataaaatttcacatgaatctccataaataatttaaacctgattctataagtgaaaccacgtaataacttcttatataaaacttatttggatgtaaaattaaaaatatttttgagtatactatatttataatagataaactcttcaaaacattctaatttatatctaaacaggctcatacccaaatgcatcaaattttggtcaatatgagaaaaactaattttgacattaccaataatgattcaactacgaagctggtattgaagtattggtaatgctccaaatgctggttagaaggcagtcaagtcaattgctaatgttgggaatggtgctggctggtccaccaattgaatatgatcgtggaataattgtagaatatggctctgttctggtgcatcttcctggaaggttgtatcattcatatttcaatgtttttgcgtaaaatattaagtccaaatcattatttactttattggatttaacagtgtttttgcgtaaaatatttagtcaaagtttttttttctaatgaacttgaaaattaagattaaaaaatataactatatttatttttcaatttttaaaatatagtaatttctaatttttcatcggacacgaaagaaaaaaaagagagagagagagagagaaagggacaggtaaaagtgcgtctaaaatgggtaaatgtttttctttgatataaaggataggtcgatatcaaaatcaataaattgagaatataaagcaatcgactcattctcttttactgttgcgcgtgttcttgatcatgcacaccttcgtgttccaatcgatcctttgaaatacagacaaattaggttaaagcgtcttagaaatctgtcttcataccgctgaatctggtgcttgtgattaaaatgaatgtggaaacttttttctcagggcatacgtgtatttaataaagcaatttggtaaggagtcaattttagcataagggtctatctcattgcaaaactaaaattgtccaaatatgtgatggtgatcgatttggaatcacctctcacttgttgattgaatgaatctgcacgctcttcttcaccttggagtcttctgagtttggagattttttttttatttatttatttgtggaaatccaacacagaaatcaataatttataataatttacacactatttttaactaaccgcattggattttctcagtttagagtttgagaaatgaaaaaagataaggaattaaagaataaatagagtataaaatgaaagaaaaatattgtacaaacccaaccatcaaaccttttcacttctatttgtatgtactaggtgaagagaaaaagagnnnnnnnnnnnnnnnnnnnnnnnnnnnnnnnnnnnnnnnnnnnnnnnnnnnnnnnnnnnnnnnnnnnnnnnnnnnnnnnnnnnnnnnnnnnnnnnnnnnnnnnnnnnnnnnnnnnnnnnnnnnnnnnnnnnnnnnnnnnnnnnnnnnnnnnnnnnnnnnnnnnnnnnnnnnnnnnnnnnnnnnnnnnnnnnnnnnnnnnnnnnnnnnnnnnnnnnnnnnnnnnnnnnnnnnnnnnnnnnnnnnnnnnnnnnnnnnnnnnnnnnnnnnnnnnnnnnnnnnnnnnnnnnnnnnnnnnnnnnnnnnnnnnnnnnnnnnnnnnnnnnnnnnnnnnnnnnnnnnnnnnnnnnnnnnnnnnnnnnnnnnnnnnnnnnnnnnnnnnnnnnnnnnnnnnnnnnnnnnnnnnnnnnnnnnnnnnnnnnnnnnnnnnnnnnnnnnnnnnnnnnnnnnnnnnnnnnnnnnnnnnnnnnnnnnnnnnnnnnnnnnnnnnnnnnnnnnnnnnnnnnnnnnnnnnnnnnnnnnnnnnnnnnnnnnnnnnnnnnnnnnnnnnnnnnnnnnnnnnnnnnnnnnnnnnnnnnnnnnnnnnnnnnnnnnnnnnnnnnnnnnnnnnnnnnnnnnnnnnnnnnnnnnnnnnnnnnnnnnnnnnnnnnnnnnnnnnnnnnnnnnnnnnnnnnnnnnnnnnnnnnnnnnnnnnnnnnnnnnnnnnnnnnnnnnnnnnnnnnnnnnnnnnnnnnnnnnnnnnnnnnnnnnnnnnnnnnnnnnnnnnnnnnnnnnnnnnnnnnnnnnnnnnnnnnnnnnnnnnnnnnnnnnnnnnnnnnnnnnnnnnnnnnnnnnnnnnnnnnnnnnnnnnnnnnnnnnnnnnnnnnnnnnnnnnnnnnnnnnnnnnnnnnnnnnnnnnnnnnnnnnnnnnnnnnnnnnnnnnnnnnnnnnnnnnnnnnnnnnnnnnnnnnnnnnnnnnnnnnnnnnnnnnnnnnnnnnnnnnnnnnnnnnnnnnnnnnnnnnnnnnnnnnnnnnnnnnnnnnnnnnnnnnnnnnnnnnnnnnnnnnnnnnnnnnnnnnnnnnnnnnnnnnnnnnnnnnnnnnnnnnnnnnnnnnnnnnnnnnnnnnnnnnnnnnnnnnnnnnnnnnnnnnnnnnnnnnnnnnnnnnnnnnnnnnnnnnnnnnnnnnnnnnnnnnnnnnnnnnnnnnnnnnnnnnnnnnnnnnnnnnnnnnnnnnnnnnnnnnnnnnnnnnnnnnnnnnnnnnnnnnnnnnnnnnnnnnnnnnnnnnnnnnnnnnnnnnnnnnnnnnnnnnnnnnnnnnnnnnnnnnnnnnnnnnnnnnnnnnnnnnnnnnnnnnnnnnnnnnnnnnnnnnnnnnnnnnnnnnnnnnnnnnnnnnnnnnnnnnnnnnnnnnnnnnnnnnnnnnnnnnnnnnnnnnnnnnnnnnnnnnnnnnnnnnnnnnnnnnnnnnnnnnnnnnnnnnnnnnnnnnnnnnnnnnnnnnnnnnnnnnnnnnnnnnnnnnnnnnnnnnnnnnnnnnnnnnnnnnnnnnnnnnnnnnnnnnnnnnnnnnnnnnnnnnnnnnnnnnnnnnnnnnnnnnnnnnnnnnnnnnnnnnnnnnnnnnnnnnnnnnnnnnnnnnnnnnnnnnnnnnnnnnnnnnnnnnnnnnnnnnnnnnnnnnnnnnnnnnnnnnnnnnnnnnnnnnnnnnnnnnnnnnnnnnnnnnnnnnnnnnnnnnnnnnnnnnnnnnnnnnnnnnnnnnnnnnnnnnnnnnnnnnnnnnnnnnnnnnnnnnnnnnnnnnnnnnnnnnnnnnnnnnnnnnnnnnnnnnnnnnnnnnnnnnnnnnnnnnnnnnnnnnnnnnnnnnnnnnnnnnnnnnnnnnnnnnnnnnnnnnnnnnnnnnnnnnnnnnnnnnnnnnnnnnnnnnnnnnnnnnnnnnnnnnnnnnnnnnnnnnnnnnnnnnnnnnnnnnnnnnnnnnnnnnnnnnnnnnnnnnnnnnnnnnnnnnnnnnnnnnnnnnnnnntaatataatgacttttaaatttaatatttaatattttaaatatatttattgtgtatattattattattattattattatttatttccatacttattctgaaaaattaaaataatgatttaaactatgtatcttatagattgagttgaattaaatataaaggaaattaaaatgattatattagagttttatctttaaaattgatttgattcaacttgagatttatattgtttttgataatttttagttttgagacttaataatacttacatttttattcttttaaaaagtattttgtgaaaattaaattaaattactcaaaatcaatgagtcacatcccattgaatacatgatgttttttttttccgatacatacatgaggttcatataaatagtagtaaccattatgaaattttattaaaataatttaattacaaaataaaagaaatcaaatgaaaattgaatgcgaagcaggtaaaaatcaggtaagaaacagggtaagcgagatttccgtacttccgttgcagagagagcgtggaaaaacacgcgacgaggcgagagtggaaatgataaataaattaaaaggcttatattttcctctcattttttctttttctgaaatttataattttaatttctcgctctccaaagtccaaacagaacacagcgtcagatcagactcagacaggagaagttgataagaacaaacaacaacgccaccagttttttttttttttttttttttttnnnnnnnnnnnnnnnnnnnnnnnnnnnnnnnnnnnnnnnnnnnnnnnnnnnnnnnnnnnnnnnnnnnnnnnnnnnnnnnnnnnnnnnnnnnnnnnnnnnnnnnnnnnnnnnnnnnnnnnnnnnnnnnnnnnnnnnnnnnnnnnnnnnnnnnnnnnnnnnnnnnnnnnnnnnnnnnnnnnnnnnnnnnnnnnnnnnnnnnnnnnnnnnnnnnnnnnnnnnnnnnnnnnnnnnnnnnnnnnnnnnnnnnnnnnnnnnnnnncttctcttcttcttccctactctcactccctatatcatttctccttccgtcgtttctcttctccctcgcgagcgtgcattgcattgctctctctctctctctcacacacacacacacaacacgacgacgtcgccgccgcgcaccgtttcggttttcctttctcctccgtcgattgcttccgcaaatagcttttcgcatgggaaacgctaacggcagagaagatggatccattcccggcgccgccgatccctcggtcgccgaacccgccgtacgtggaactcacgcgccagactcgcgccctccggttcgcgccttctcatccgattcaatggccaatagcccgccgcagagccctcgccgttccagatcgccgatcctcttcggtcctcaggttctctccacaacatcctctttgtctcttgcttcctcttcgatttttctgcattttaaaagtcttcacgctttttcgtttctgctgaatttaattttactagctagggtggaattttggttttgttcggtcaactaggttattcgttgattttactttctgcgttcggttggtgagtatcgtgctaacatatgtctggtgcatgagagacagagagcgagagattaggaggcagtgtaggtagggttactttttttgttgaaaccgtggattatttactgagtttattttttatcgccatcggagttgaaactaaatgtgttgttgaacggatctggtaattatgttgttgatgtattcgtcctttctttcatggatcatcatgaacgtggttcagattgaatgactgtgtttggatacatgttgtggatgtaaaaatttacgtcaaattgtagaataacgtggaagctataattcacagcttctttactgacgcagaaatatgcttccaaacacgcaataagcatgacagtgaccaacaggaatgtggctggttttgatcgaatgcatatggtttgaattttgaaaactcgtttggggagggcatggagggcagaatggtgtggatcttggagattactgctacacctgcttgttctttttgaaaatgttattgatgtgtatttatatctgtctgtttaaggagagtcacccctcctttttgtagactctgtgcaatgctgcaatcccatttttgtgtagtgacagtttgaaaacattttacttgatttatacttatgtgagtctcagcttcacagctcacacaactactacacacgactccatctaagtttaagccatcccacataattcttttccggttaaactcacatgttgtggatggttgtgaccggatagttacgccatttggaaatacacatttgtagttttagtctaccgatattaacctgttaattttgtctgattcggaaattgcatgcaataatgtcctctggattgagcgtgtgaacgtgctgtttggaacgtgaccagttatatcacttatatcatggaatcagttttatttgtttaacggtataattttgttttatgtcaatttttgtgatgcctgtcctccgttactcacattcctcaacatttctccatttgagaaacaacacgtgaaatattgcaatacggatagatgatactgcctgctaatagtgatgcaataattttttgtggttatgttctaatagctgttgagggtgtactttcaaaagtgctacacaagactacaagcttggcattcaatgtacattcaatatttttctgtgcctctattaccccctacccaatgttatatcgatcccatgaatttggtaaatatttgcccaatgtctcttttatgcctattaatgttctgaatgtcctttttttgtctttgatttgtggagaacctggtgaaaaagttatattctataggcacctctctctctcgtgtagagttgatatatttccatgtcgagcaaaacttaaaagacaagacatgcttaagtttattttgtatgaattactgtccatagctatttggtggcacttttgcaccatagctacttgcccttgctaacaactccaatgaaactttgattatattttcctataaatcaggaaaattagaggacattcatgttttagtaactcatagttattgttactaataaacatagtagtcaatcttgtaatagtggttttgtggtatgccgctttgcccctctatctgggattggtgactagactaataaatatgttagagctgttctcaaggttgtaaacgaagggctagtgacatacatgtgcattaacaatcaaaacaacctccctccactttgtttttttcctttttgtgaaaaaaaagtaacaaaaccttaaatttgcctgtctttgaatataaatttggaagagagaatattattatgtgccattaaataacatggttgctagataatttttttgatattaatatttaatatagtttgatctgagaatgcattgtgtgaaaaatcatgatatacttgttgatggatcaacttaagttgcgtgattatacttatactttctattgtaaattttctttaccttgagtgatttttgctaatgaattgaagaggttgacacttgacagaaatgtatagttttgtgaattaaaatttctctatctgaaaagtgtagtttttttgttataacttgagcactctgttcttgttgacttagctttctcccatggaaatggtaaatatattcttatacatcttttatgatctgcaatacatatgaagctttctttcttcatgtgtgtgtgtgtgtggctcactgaaatttcaatttctttctagttaggatttttttttttttttctgggttaggaaacatgtaaatctcaccagtggcaattttgcattacttcaaaataaatgtagaatttccttgtgtttttcaggttcctctagctccattacaaagaggtaatggccctccttttctcaatcaaatgtggcagaatgagtctcacggtattgttaatcaacttcctgagcaagggatccctgtcatgattacatggaactatggtggtaacaatgtggctgtggagggatcttgggataactggacatctaggtgagatttaacgactccttttttggtaacaatagtgctggattgtatttgacataaaaagttatcataactgcaaatgatctacaatgagattagtaccagtaaattttattacttgcaggaaggcattacagcgaggtggcaaggatcactcaatccttatagtccttccaccaggtatatatcattacaggttcattgttgatggtgaagagagatttattccagagcttcctaatgtagctgatgagatggggcatgtctgcaatcttcttgatgttaatgtatgcatcgacctatttgtttctttctctttatgaaaacaacatcattttgtgaacatattttcatcatgaaatttgttctcctgtatatttaattgtgtgtctgcattgaaatctttttcttctgtgtcaaggtgaatgcttcagttgggttttaagatgaacttgacatacaacagataccgaagatctttcccccctccccctcttctaggtctttgttgtatgttgtatttgtggtgaggagggtgaggacaggtaggggtgtgcaaaaaaaccagttcggatcgaaccggattgcaaccaaactgaaactgaatcggtttttatccaaactggtttgaacaaaaaataaatgcacggttttacaaaaccagtttggttaaccgaattgtttatacaaaacctatccggttaaccgaactggttttcaccggaatcaaattccttttatttgaaaaacccagtttgaaattcgtttggttcttagaaccagtttaaaactggttcaaaaccgtttttaaaagccactccagttctgagccggttttctaaaccagttcggctatttggatataaaaccgatttaattgattcagaatcagttcggttcgatttctactggacaggtagctaggtgggtggggcaaggaaagagtaatgcatcctatgttgttttgtcatgtctgcactctgcatgccatatgtggagatataggatgaacatagacgggaaacactggtttctgcactctactattggttcatggaaagccatttttcataggtttttgtgcttttagggctgggcattagtgggactgttgaatgaaaatcgagtaataaaaactagcaaattgtttcacaattttgctttacttgactatcaatacaaaaagaaaaattcagttgatttgtctttcaattaatgattttaaatgttatggttttctgcaggattatgtgccagaaaaccctgatggtgtgtccgagtttgaagcaccaccctccccagaatccagctatggtcaagcatttccagctgaggaagactttgcaaaagagccgatggccgttccttcgcagctgcatctgactgtcctaggtatggagaactctgacataggttcctcttcaaagcctcaacatgttgtgctaaatcatgtcttcatagagaaaaatttggccttaaagtctgttgttgccctgggactcactcacaggttccagtccaaatatgtgacagttgtcctttacaaaccactcaagaggtgaaatatgtgacgcttgtcaattatataaaccttttttttttcttttttctttttggtagccccagtctgtaaagatgaaaatttaaataatactccttgacaggtggtatatgaagggcttgtgtctatatatgcttgaggcttctgttcaaattgataaattaaaccttttgtttcttttccttcttgaattattgaagtatcaatatggtgtcttatggtaaagctactggaggtggtaagggggtgctggtcataattatgtttttttggatcaaaatatcaaattattagcttaaaataatggtacctttggatggaaagacaggaaatatagagaaagtaactagagagaaaatatgttattttctctcggtggaagaaaaagtgagaaagagaaagaaaaaattgaattttagaaacaaatttggcttgcttattttatatttttgaaaactgttttctattctttgaaattatttgatggaaatatatttattgaaatatattttcaaaacttttttttttttagtttttatagccaaaaacttgtatcattttcaaatcnnnnnnnnnnnnnnnnnnnnnnnnnnnnnnnnnnnnnnnnnnnnnnnnnnnnnnnnnnnnnnnnnnnnnnnnnnnnnnnnnnnnnnnnnnnnnnnnnnnnnnnnnnnnnnnnnnnnnnnnnnnnnnnnnnnnnnnnnnnnnnnnnnnnnnnnnnnnnnnnnnnnnnnnnnnnnnnnnnnnnnnnnnnnnnnnnnnnnnnnnnnnnnnnnnnnnnnnnnnnnnnnnnnnnnnnnnnnnnnnnnnnnnnnnnnnnnnnnnnnnnnnnnnnnnnnnnnnnnnnnnnnnnnnnnnnnnnnnnnnnnnnnnnnnnnnnnnnnnnnnnnnnnnnnnnnnnnnnnnnnnnnnnnnnnnnnnnnnnnnnnnnnnnnnnnnnnnnnnnnnnnnnnnnnnnnnnnnnnnnnnnnnnnnnnnnnnnnnnnnnnnnnnnnnnnnnnnnnnnnnnnnnnnnnnnnnnnnnnnnnnnnnnnnnnnnnnnnnnnnnnnnnnnnnnnnnnnnnnnnnnnnnnnnnnnnnnnnnnnnnnnnnnnnnnnnnnnnnnnnnnnnnnnnnnnnnnnnnnnnnnnnnnnnnnnnnnnnnnnnnnnnnnnnnnnnnnnnnnnnnnnnnnnnnnnnnnnnnnnnnnnnnnnnnnnnnnnnnnnnnnnnnnnnnnnnnnnnnnnnnnnnnnnnnnnnnnnnnnnnnnnnnnnnnnnnnnttcctatcaaacacactcgtaatcattacatgcaaagagtagaagtagtgagtacaagttcaataatcaaaggaagacatcaattttcattttcatttaaattaaggaggacacatgaataaaggccatatcaagagcagaattgtgtgttgtctgagggatcccgcagaagtttgtgaagatattttggattttattatagagtaaaaaattctaattaaaatgattatataaaaaaaacagttaagggatcaacaacacctcctaggctgaaaaaaaggtcgatacatttttgttgaatgaattcatttttcttcttctaattattatgagaaatatggatccaaaatattattgtcctttaatttaatgtataaatgttgttaaatttatattatttgaataatctgcactgcaccccaagagatattgatatggttcctcccttacgtgcaacaaaatcattgagattcttctgtccaccttattattttctccctcttcccttgtatttttatcatttctttttctttttctttttcttggtaatttatctccttttaacttggttcctctagtttgcacactttattctgcctacttgcttttcttttttaaaaatccatgattgaagctttgttctattcgagatttgaagtatgtatagctattgcatgcatgcctaaagagaccttagtcggcatgatattttacagacaccaaacaaagccaacaacatgcttgtgcccgctccatgtttggttgtgaaaaaagttttaccaattaccatgctaatgctaaatatttaatttaaaggaataaaatgagtatacaagtgaaaaaagatgaaagatttaaattaaattaaagaaatgaaatgagtgtaaaagtgaaaaaaagatgaaacaagataaattttttaaattaaagtaaactaatgaaatcttagaccaacaccaattcttaaaattttcatgtccaacataccaagatgaaaggaaccaaacactaaccatcgtgagtgacatgcaaaatcccaaaggggtcagaaatgaagatgccacagtatagtaagcaggttaagccgtaccataaggtacagcatgttactatttataacatgacgactgtgccaatacagtagtacaaatgtacaatactatgtactgaagattccttttctttttaaggatgctatcacttatccaagttaacagaatcacgacaaattggacatctggaacatgaaacaaggatctggatcttctagacttctacagtttcaaaattaactgcacctatacagttgcaaatcaattcattaaagttaataaaatttaattttaaatgttaatttattgcataataaaataaaatgaatggattcataagattcatccagtttctctaaaaactgttgaggatcaaaatcccgaaaacagatgttaacaaagtcatttccgtgggataaattattcaaaggtcctctcgtgagggtgtgtttgatacagatgcaaaagttatttcaataatcaattacatgtataattgattataattagaattgatttttatttgtataagtttgttgataaaaatcagctttcacataataaattagaaaaaaaaagtacaaggttattgggcaaaagttgttgggaaatttgggaataacttaagaattatgtttttaagagaaaaaaggttgttgagaaataatcacaaattcaaatttttagatatatgaaagcaacttaattatttttcaatgtattttcttaacaaatttttagataacgaaaacaacttattttttcaatgaaaaaactttttatcaaattttggctgatgtcctaaacactaattatttttaaaacacttttatttctataacaaaagctaaaatgaaaaaatagggttaaatctatttttgctcctttaaaaatataacaaatttgattttactccttgaattttttttcctttgcatttgattccaaaattttagaaatgttagattttagtccttttctttaactatgttaagaggtaggagacagtgtggtgagtggattcaatgaggatcttgatcttaagcaattacatcaactcagaatagatccctgacgacatccgtcaaaggaacattatcttctccaatcatctatttttattacttttttactttttgtaattatgtttttaattggttaacttaattttgtttttaatttttctaattagttacatgccatatcaagttacttcaaaaccaccgactgggatgaccacgtggtcacatttaactatagaagaagcaaacataattttaaaaaaactaaaatttgatatttctaaaattctggagattaaatgtaattttttttcttttaaggaattaaattcaaatccaatgtattttcaaaggacgaaaatatatttaaccccaataaatattatccaaaacatgagtggaggaaccctccaaacatttaaatcattgatttaagtaatatagaaaaatggatgtcttttgacaaccaaatatattgtcaaggaaaaagtgaaaagagtaatgcctcattcatcagccaaatacattttttttatttatttatctctttttatcacatcacagcttccataagatctatcataggtgtttatacccaaggaaaaagaggaagaagttggtgcctccacgatggtggttctggcattgtgcatcttcaaaagcacccacatgttaagaattggcgcagtgattttgactttgcttgtgctttcgcagtggatttggatttggatttgtattttctgctgctagcacaatgcctcattctgaaagaaattaatctcgtgccatcagtaagggaaaatctttcgtgctcaggttggattgtgcggcatcaatgtcccacgtagaaccatttaatgtaacaataaataatataatgtttcattatcttaacataattgctaagtaaacatttttggggttagcttcgattttcttgatcctatgcctttttatttgggttccaaaggcacgttcatgggacgtgtactagtttgatgtttgcattttaagtacattattatcctagttatcggaaacgagatctaaacaagttggcaaggctgtgcatatttctttaattattagtaaaatcactttttattttgctaaaggcgtgttgacaaattaaacacaacactcttgatctagatcgttgccatgttgttattaacttcttcattattggattgaagtcgagaaatgcaaaatgatcacagaaacaatcatataatagcataaagacggttttaacagtataagtcacccacatgtaaaagcaccaattgcaaccaattgttccagtttcatggtagtaacccaaaaaagatgaaaagtgaagtacaaatgcatggtgagacacagctaatccaagctactaaaacaagggacagagcaaacaagtagaaaatactaatgagcaataccaataaataaaagcaaacacaaacccgaccaacaaaaactaatgaccccaaatgaagattgtcctaatgaaaatagatttttcatcaaaacttatctgccctgtcccttttctgttcatgtgctttcaaatgttattgttatggttgattggtcctcacttggccatcatgactttgacaaactcctcgtagttgatctgcccgtcaccgtcaacgtcagcctcacgaatcatctcgtcgacttcctcgtcggtcagcttctcaccgagattggtcatcacgtggcggagctctgctgcagagatgaaaccattctgatccttgtcaaacacgcggaaagcctccttcagctcctcctctgaatctgtgtctttcatcttgcgtgccatgagattgaggaattctgggaaatcaatggtaccattcccatcagcatcaacctcatttatcatatcctgcagctcagcctcagttgggttctgcccaagtgaccgcatcacagtcccaagttccttggtggtaatacaacctgtatcatttggaaacaaaagaaaaaaagttaaacacaaacaagaaattcagcctcacaaggaaatgcatgatccaatttaagaatcaatcaagtgcatgtttggaaactcatcacaaagcaaaatattatgtcaatttagttagcttcaggttggaaacacacattaacaacatgcaaccaaacacgttataagacgaacacttagatctaaaattttggttttctgctcaaatcatattcccaagtttcgttcaagagcttcaaacacatcaacactaatgacgggaatgtgaacatggggagtggtatccataatattccaggttaatatgatcttttgtctacaatttcataaatctataaatgtattataacgatacaagactcacaaatccagtactatgggggaaaaaaatcctttccattcattataaaccacgcacaactcaacaataatcaatcataaatcccacttccttattctgataagagattcacataccatgcaattcttatttcattctcagatatatcttcaaaagtaacaaatggaaaaaaaatgcagtcaataaacataaagggggtcaatcctatacgagtaattatataaacatacattttcatatttccaacccattttcttcctatctctttatttcccatcatatcattatcaccatctcttcctacctaaatccacctaaaagggggggtggaaatttatatttttccattctatattaagttatttacaaatccaaacatgtagcaccaaatgtcacatccacacaaacaattccgaatttctgatcgagaaatcaaacacccacaaatcaaatctggattcacagttgaaaacattcaccccaaccaaccccacaatcctagaacaggaaaaattatcacatcacaagcaacattagcgaagggcaaaacgggaaaaaaggttggatatttcagcgagaatgcaaatccaattcattcataatacacccacaaacatcaaggagcaaaaagtgaaaggagaagacacccaatgaggaaaagattaaaaattcaacaaaataatcaaaagggtaagaaagaaaacgagattggaatgagatctaatgataagagggagagagagagagagagagaagggatctgagaaaagagaccatcgccgtccttgtcgaagaggctaaaggcttccttgaactcagagatctgttcgtcggtgagttgatcggccattggaaattaattgatcgatggatctctctctttgcgatgtgatgtgatgtggaaaaatataaaaggaggactatgttatttatatgctcttacaaacaccaacgaggacttctcttttctttttatggtgtacttaattccttaattcaaacataatctagctgtcataacgccaaattaatgtattattctctaacaatagaaccaacaacactagtagtaaggtctacacaaaattacaatggtacttaactctctaataatatgtgcttttgattctttgtttgatgttttttaaaggaaataaaaaaagtaaatactagtttatacactttttatatggttggttaatcatgtaagaatgtaagataatttgttaattttataataattatttttaaaaaaataatatctattgaaatattttattggtgaactgcgtaatttttttatgctgataatgcataaaaaataaaatctaaaatgaaacaaaattgaagagaaagaaagaaagaaagagagcagagaaatggagaaactcgcaaattcattttcagtgttagaactcgacgccgacgatagccatgttcccaccactgccggtacccttttctctcttctctctcccattcaatttccacctttccatgcgtagttgatgaactttgggttagggtttcacacctgttcattttgttgctgatgaatttttaattttattttttttattgaattttgcgttgaagtgtgtttaatatcttgcaagttggtcgttcagtgcactgctccaatgctagagtgtatcacagagacagagtgacaaaacatcaaatttttaaatataaacgaaaataacgatgattcaattctaatttatagtgtcttcactttgttgaatatgagtgcttctgctgcaacaacatgaaaacacattgcaaattttaagcataaaaaataaaaaacacaacctttatctatttttctatccctcccattctttctttctactattatggttatttttctctgctgtaatctaatcttcatagctctagtgcagccactgaattactacttctatttttattttcttttgtgttcaatttttcttcttttgtgttttgattcttgtgtttgagaaactcaaaaaataagcttatacccgaattaacaaaaaataagcttatgaatcacctcatgctgatatcttctgtagtcaacttgttgttctccatatttatttgtactaactagttacataaatatcctggatggatgtttgctacggggaacattatgttgattactatgaagtgaactagcagctaaaagatactttcatggcgcaggtagtagtgacaagagggttaatgccgacattgacattgtaccggtaaaaagcaagaaacaaaatcaagaaaatccagtgactccttcatgtgaatacaagttacctcttgtgtggattgacttggaaatgactggtaagcttgtagaatgggttgtttggagtgtgttttgcttgtttctatttagataaatatttttcattatgtttttctttgtgtttggtttgtcttgttctcgaatctctaaatctttcagcaacaaagctcttacattttttgatattgtaccaatacttgtgttaacatggctctacatctaaggtagaattatagtaactcaaagtgagccttcttcctagcaatttggataaactttatgttttggaaacatgtgctctccaaggtgaattattgtttagtattctatccttccgaggattattttcttaaaaaaaaccgtgttataattagcagtccctctctctatttcatgcttttaaatgctttcttgaaacctttgctattgttgggcttatcaactttagttcttgacctgctaaaggcatgtctttttttgcttgaaggactgtcagcctatgatctgaatgttatttggagttcatcatctgcatgcaccctcctgattttgcttataaaatttcactgctagttatcatttctccattttgtaaattttatccggtagaatgcatttctaatcctgcctctttaattgcacaacttctgtgttatgcaattttctccttgttgacataattagaaatcttacattagattatctattgttgttgtatttactattttgtggtgctcaccaagtaggctatatattctttagtcgcaaactatgttactgtcagttcttggataacatttgaattgtttagtgcctgatgatgatgaatgttgaaccttctctgtgtgtgcaggtttaaatattgaagtggacagaatattggagattgcttgtataattacagatggaaatttagccaaaacagtggaggtatttaattcaatgttataatttccatgctcattttttgttttcgacttggtcgtttccatgcttcactatattttaaatgagattctacattctcccgtctctagctaataacattcctctttcttacttttttcccctctctgttttttatatggaaaaaacttgcttattccatagactagaacccgtcttactcgacattttgatgcttgtaagcgggaaattatttagagttttttcctatctgcatatcatactaagcacatggttgaattttatttgaaatcaaaaaatttgatgggtgcttcaccttatttaatgaatctcccctagttttgcagttttcaataaattgtaatctatatgagagtgtgtacctagcactccgcttaaaagtaaataggtaatctagtacgtacgatcacgtaagagtgtgtatgaaagaaagtatctgctatttttagggtcctgatttggtcatccatcaaactaaggagtgccttgacgggatgggagaatggtgtcaaagtcatcatgcagctagtggtaagtggtaaatgttgtattttgatactttaatttttgttaagagaaaaaaacattttattagagagatggccatggggagtgtaagatatccttcaaaatagataaactaatttaataaattatagaatatgaagaaatttgagactatattattcatgagttgctgattggttgtttttccttaacattatttagttcacttttatttccttttgaattggattttaaatggcattgactaacaatttttcaataaatttagggttaacaatgaaggtgctaaaaagtacaataagtgaaggagaagctgaaaagcaggtttgtagtaaatataccatgtggcatgtggcaagctctcttttcataggagcttactttctatcaactatcatgttaaatgggtactgtattttctatattcaatgaacttgaaaaaatgttatcctttttatagacatatgaaatagttaaacttgtctattagggattgcagaatcttagtatatggaaggaaattgaatttctcattatccatcacaaatttcataaaaagtatttgtgtggcacattatatgtcaggaaagtttttggcagctgagaaaaaaaatttccctaccagaaaacctgttcttttttctctaaagattcatgttactggcatgaacagttgaaataaatgcattttaaattttacttaaagagtgatctggtcattgtgtaacttatataatatatttaagtagttataacttataaggctatacagttatcagcagatcgctgctgtttcccttcttctaggctggtgtttaatgtagcacaaatggtttcttatgttgtgatatcaatgtagtgacgtgtctagtcttttagaaccacaccccaaactagttattgtagttgaaggacctaaggccttatgaaacccatacttccaatcatacttattaatagcggcgctattgcgcgctttctaggagtagcggtgcagtgcgacgaccggccgccacagaccgcattgcgacagtgagactgagggtagcgctagtagcggccgttatcgcgactgagttgcggctgaaaagcgccgccacaggaatctaagaaaacgaaatacatcgaggaagacgaaagaataaggaagaagaaaggttgagggtaaaactgtaaaatgactattttattcctgaaatctcttttattttaacatttaagagaggtagaagtttaagtaatagtaacttttaagaggtaaaaccgtaaaaaatttaaatctctatgattttcaaagagataaaacagtaaaagtaaaagtttaccttattttaagcaaaaaaatccaaacgtctatttaagtaatgagaatactactaggagaatccaaacgtcttatataaatccttatcacccaatattttcaaaattcatcctcaatcctaatcgtcccatactttcaaaaactctcatctcctcctcttccaaagcattcaactttgttgagcaacactggttagttttatattatatttttattttatcagcaattttttttcttttttttttgtattaacactttgttgagcaacactcatttttttttattatatttctattttttatcaacactattttattttctcaacattaatttttgtttttgtacctctgttttatacttttatgtttgatatttatgtcatattttttttggaggattatgtttgtgaagtttatatatataattcattttagaatatattcacttatatacttcgctgtagcggtctactgctacgtgctatagcgctatagcattttttaggggtggttgctatgcgccgctatctgagattaataagtatgcttccaatgcaggactcaagtcccataccttgcaattggatcctaacacaccaaaaaccaataagttggtagtaaacaaaactagtttgcatttggcatcctagtcctgcatcaagccaatgatatcagttccagtcatatgggagtagtgcttgggtgacacccatgtcatatttgcttgttgtgttggaagtgtccataaactgatatcctttttcctgtatattgccacttgatctgtgatgaactgaactattgacgtactacttttggtctttactggaatgcaatgaccgagtctctttccctttctttgttctattcatttattctcttttataatgaaaatctgtaatgtcttgcaaaattgcaggttattgaatttgttaagagatatgttaatgttggttcgtacacacctctcttggcaggaaattcaatatatgttgattttcaatttctgaaggtattggttctgccatagtaacttgtagaaagtggctctgctgaagcatcattaatttataaattctaattatcataatgttgtttgtctttatagaacagatgtattcctcaagtctcggtttcttttgttaatttctgctgaaaattattggtcacatcgcataatcaatttttttttataaataacatcatatatcaatacaacaatattgggtattgtttatatttcatgcttgccaagtgatggtaattttgttggtcaacacatcataacatttatgaagttggacatctggtaaaagatcaggttgagacttgagacactgatgaaaatttatgtcatctgaatatagaatctctatttttttagaccagttccccttccattctgcatatcctgatcaagccttcttaaaacatatactgctatttttatttggtaccgctatatttcctattgttcctgtttgaaatgttctggttctgtcttaactagatcattttttgcagaaatacatgccaaaattggcaagtctcttctctcatgtacttgttgatgttagtagtgttaaagctctctgcattcgctggtatcccaaaggtgagaaattatacaattagtatataattaaattttctttggtattagtgcattaaatcatactgaagtttaatatttgttatgaactatcaatcacttcttgatcccttaaggccttaatctctgccccataaccatcttcacccccataaaaagaaggaattgttttgtgcttgagattggtggtcagttccagtgcctatcactgcattgtttttactggatctgttatgtaaacatgattcttctagtttttttggtgctattcatgtaatataggttagctccatttggttgaactggtaagtaatatgataaaacatctcatttctatcagaaagttttcaatttccagtggttatgatttatgaattaataatttaatatggccctttttaaaccaaaatataaagaattccttctgtcagctgtccttttgtgtcaaaattctgattgacttcctagttttgtttccctacattttctgcaagccatattagtagggcaactttaacacatggatcagaggttttaacatgactaccccttcttttgtatttctgaccttggctcaacatcccaagggcaaaatacagttgagaaggtgaaaattggaaagttaccaaaaaagtgatgttttaaaacttacacaagattatggacatgctacccgtctcctcaaaaacaattcaacttatgaacaaatatacattctatgctgctgttatttagaggtaaaatcccttagtttttaagggcctatgactttagatatctatgtaatagcgtaaagatgcttagaaacttggcaaggtaactaaaggagatgcttgttgatatatttgttgttagttcttttgatgttttaactttgaagcttggaatctcaccactaccccttttgctcttggacgtcttgatcataattaatgactatattttacttacaaatattctttgcccccaattgtaataatacacggtaaccatttacacattccaaagagacgagaaacaatggatatataagtacttctgggattttgatccttgtttttacttgatttttttataattataatcattatgttatttcctgttttccaaggggagctgttgactaattattaattaatcaatctgagaaagaacttcagatatgcctgcttgtaaactataaaggcttatcatttgtgcagatcagaagagagcaccttcaaaattaaacagacacagagctttggatgacattagagaaagcattgaagaacttagatactacaaggcaaatatttttaagcccaagtccagaaagtcatagggatgcagagaaatcagcgtaagaatgatgggcaggttttcaggtcaagtgtaaaatcttattacaaatatctatgatccatattcgctataaaggaccagaaatgccttgcttacgttttctgttgaggtctatcctgtagaggtactccaattggatcagtgatcgatttctaattgttatggagggtttgcgctgagtaaatggctcgtgattttggataaagtgtagttactgcaaaatcatctttaaatttgtactgaaaaccatgatgtgcaagttaaattgagcttcaactccattgtccattaaagaaagaaaaaggaaatgtaaatgttgattacactacccaaagaaatgtcatgtactaatgttttgtttggtttcatgttgaataattaattcttagtctagaattgattttagattaattttcatatgtttgattttacattaaagaagatttcaaagttgattttggatttataattaattttaagttgaaataattttgagtaattttgtgttatatcaaaaaatttatattaaattttatttttaacttgattttataataaaaatatttaaatataagttatattatttataattaattttgaataaaattaattttattcaaaattaattttgtcaatgctaaaaacaaggagcaattgtacattatatatgtaaataacatgggtaaaagacgtttggacaatgagtagtagcatgagtaacaatcacaccaaataagcatgtatactaactttaaggtaacaaacgaggacatgaattatagtgttggaaatcacaatggttattttcatttgccagtttatattagaaccaaagtgcgggaaagaaaaacaaacaaagagtatagaaaactctacaaatataatcctttcataacctcctatagtattacactttgaatgttatgagcctgtgaccagtaactttttttctttctgaagtcctagagtgtcaaccattaaaaaccagtccatccaacacagatgagtagataactttatcaggggaacaaaggtcatccacaaagaaattaattccatcagtcaataacacgcctgcactgctttgcagctgatgtaaacattgtttacaatactattacctgtcattttctacttcctatctttatattggacttcacaaatgcctgctgagattctgtaaaagtaatttcagattcctttttgtagtctcgtccccagtaaaaccaacaatatccttgctaatattctgcagtgatacagccaaaaatcaaataattagatggggaaatgaaatactattcataataattagatttagttattttgccacattagggtcatacctcaatgttcttcaaggtaaaactaattgtgtttatggacttctgaaacagttcagtgttctcaggggtcatgatggatgaatgtacccttctgcgtacacaaagggtgatttctgttagtcattatacttaagaatgttctgagtgtaaaattaaagagtacaaggaattttggaatcagtccaattctgtctagtcctaatgggcaaaagcacacattctggataaacataataggtgaatgcttttcttatttactagagagaataataaggggactttatgatcaatttcaatttatagggtgtgcaactgaaacacaagaaacaagttacgacatcatttttttgccgttatcccatcaagtctccctcaatcagaatataaaatgttactatgttagttggcatcccctacactaatgggtaatgtcaatgtgctacatggcaatctgaatataatgatgcatgcaagccaaattggtgatagacaagagccatagaagtttaggcaattaacctcaaatcatcagaagcttggataaggttttgggttaaattctcaacttccttcaacaggccataatcacggacttcagccaaccaaggttgaacatcttcagccatggctttgatctgagccatcaatgcatgacagaatgattgaaaataaaaaagaaacaaacaaatacctactgcatagagatgataaacgaatgtcataagggtactatacatgcatattcaccattattattttatgtttttggagatagaagaaactaatatttcatttatcatcatgaactaatctatttttctgttggcaagaaaattgtttgatccaaaggttcattcaagagcactacacctgtgtaagaagtggtttcgcttcttcaataatggaaaatactcgttgagccattgtatagctattgatgataccaattttctctatctcgagaccaagccggatgtaaattccaatcaatgtatccaaacttgttccttggtcaccattgatcttttcgcgatcacacacaataagaccttccttagtacagtcttggtgaagagggccaacagaaggtgttggaattggctcacgaggagtgatgtcaatttttgtttccataagaagaccggactggttaaccatgatcaatgaatttcgcggtataactgttttatcgtcaccaacctgcaaatggaaaactggtggtttaataaaacaattcaacaactaaggtcctacttagataaacttcaccataagcacttactcgagaagaaaataaaaggtaaacagagtcgagttttttccatcagctaaaatcaacttatgcacttcagcttttattcagcattcacagcagaaacataatcttattttcttctcctcttataaatgtttatggagaaatttatacacaagcgacgttaaacagacaatgtcaaacacaagcaagattttaatccagggatactaaagtgctcaattaaagaattgaaaggcacctcaacaactacttcaatacttttcaaggaaggattcacaccaatgacattgccaacagtggcccctctgattctcacaggcgttcctttgcttatgccacaagcttcagcaaactcaaacaccactgtgtacttccggaatttggatctgatttggaagcccctcaaccaggccaagctaagaacaaataggacagtaccagacactagaaacagtccaaccccaccttcccagatgctcctatcattgaaccctaaatcacttaatggccgcaatgtttgcctccaaacggcccatggaatgtttgacaaagctgaaagtggtttctttgcttctgaagaagatgatgatgacctttggccatgacctgaatcagcagatgtagctcttttcctgttgatttgtgtctggcgtcgaattggaagagggatggaacttgaaggatttcttggcagggtaatcagagatgaagaaaaagaagttggcaatgatgagacatggagtgcagggttcccaaccatcttctcaacaacctcttagccctgaagttctatcatccacacagacacaaaaacaaacaaggttttaagctacatcaacaaaccaattgaactagaatcaaaatcatataaatctaatcagcaactaataatacacaattaaatgacaacaattaaaaagaacaaaaaatacaaacacagaaggcacaaattacatatataaattccattgattctaataacatcagaaaaatcaaattggttggaaatggacaatgcaggggatatatagttatatttcaagcgtaggataataaaannnnnnnnnnnnnnnnnnnnnnnnnnnnnnnnnnnnnnnnnnnnnnnnnnnnnnnnnnnnnnnnnnnnnnnnnnnnnnnnnnnnnnnnnnnnnnnnnnnnnnnnnnnnnnnnnnnnnnnnnnnnnnnnnnnnnnnnnnnnnnnnnnnnnnnnnnnnnnnnnnnnnnnnnnnnnnnnnnnnnnnnnnnnnnnnnnnnnnnnnnnnnnnnnnnnnnnnnnnnnnnnnnnnnnnnnnnnnnnnnnnnnnnnnnnnnnnnnnnnnnnnnnnnnnnnnnnnnnnnnnnnnnnnnnnnnnnnnnnnnnnnnnnnnnnnnnnnnnnnnnnnnnnnnnnnnnnnnaaaaaaaaaaaaaacagacttcaccattccataatgtgaatattattgcagaaatggaaagttagcaatttgagggtagcataatattgggtttggcttggttggaccctaaaccgaaacctaacaaaaacgaaataccgggcaacacgtaaaagcgcttccaatatgatattcagcaccaaaagataccattttttacctaacaagcaagtaaagtagattgaaggatgaagaaaatatttcagataaattgaatgccaaataaaagtctcttgatggtggaaaaaaatgactaatgttgggtccttgaaaacaagtttgagtgacagtgtgacactgttggcatcatcatcaaacaaataaaagagacattatcgtagtgtgaatggaagagacagaaacctatgcagcatgaagtagcatggacatcaataagagtgaggcatttcaattttaacgttctaagaaattgttatatacaacaatttggttaaacaagtaaacgtatcatgaccaatttgttttttattttatttatttttataaagacaatttgtttttcttttctagaatcatgaacaaattgttattaataaataataacactctttattgcatttatttatacaaaatttcatgttaatcttttttattaaataaatttttaaaaaaattagtggaaaatattaatttataatgaagtgtttaaaaaagataccaaccaagtaatgtattataattattttattaggaaaactacgtaccttattttgtcaaataatcgcttatgtatgtcatgtaatttatcttatacattgtcatttaataataaaatatattnnnnnnnnnnnnnnnnnnnnnnnnnnnnnnnnnnnnnnnnnnnnnnnnnnnnnnnnnnnnnnnnnnnnnnnnnnnnnnnnnnnnnnnnnnnnnnnnnnnnnnnnnnnnnnnnnnnnnnnnnnnnnnnnnnnnnnnnnnnnnnnnnnnnnnnnnnnnnnnnnnnnnnnnnnnnnnnnnnnnnnnnnnnnnnnnnnnnnnnnnnnnnnnnnnnnnnnnnnnnnnnnnnnnnnnnnnnnnnnnnnnnnnnnnnnnnnnnnnnnnnnnnnnnnnnnnnnnnnnnnnnnnnnnnnnnnnnnnnnnnnnnnnnnnnnnnnnnnnnnnnnnnnnnnnnnnnnnnnnnnnnnnnnnnnnnnnnnnnnnnnnnnnnnnnnnnnnnnnnnnnnnnnnnnnnnnnnnnnnnnnnnnnnnnnnnnnnnnnnnnnnnnnnnnnnnnnnnnnnnnnnnnnnnnnnnnnnnnnnnnnnnnnnnnnnnnnnnnnnnnnnnnnnnnnnnnnnnnnnnnnnnnnnnnnnnnnnnnnnnnnnnnnnnnnnnnnnnnnnnnnnnnnnnnnnnnnnnnnnnnnnnnnnnnnnnnnnnnnnnnnnnnnnnnnnnnnnnnnnnnnnnnnnnnnnnnnnnnnnnnnnnnnnnnnnnnnnnnnnnnnnnnnnnnnnnnnnnnnnnnnnnnnnnnnnnnnnnnnnnnnnnnnnnnnnnnnnnnnnnnnnnnnnnnnnnnnnnnnnnnnnnnnnnnnnnnnnnnnnnnnnnnnnnnnnnnnnnnnnnnnnnnnnnnnnnnnnnnnnnnnnnnnnnnnnnnnnnnnnnnnnnnnnnnnnnnnnnnnnnnnnnnnnnnnnnnnnnnnnnnnnnnnnnnnnnnnnnnnnnnnnnnnnnnnnnnnnnnnnnnnnnnnnnnnnnnnnnnnnnnnnnnnnnnnnnnnnnnnnnnnnnnnnnnnnnnnnnnnnnnnnnnnnnnnnnnnnnnnnnnnnnnnnnnnnnnnnnnnnnnnnnnnnnnnnnnnnnnnnnnnnnnnnnnnnnnnnnnnnnnnnnnnnnnnnnnnnnnnnnnnnnnnnnnnnnnnnnnnnnnnnnnnnnnnnnnnnnnnnnnnnnnnnnnnnnnnnnnnnnnnnnnnnnnnnnnnnnnnnnnnnnnnnnnnnnnnnnnnnnnnnnnnnnnnnnnnnnnnnnnnnnnnnnnnnnnnnnnnnnnnnnnnnnnnnnnnnnnnnnnnnnnnnnnnnnnnnnnnnnnnnnnnnnnnnnnnnnnnnnnnnnnnnnnnnnnnnnnnnnnnnnnnnnnnnnnnnnnnnnnnnnnnnnnnnnnnnnnnnnnnnnnnnnnnnnnnnnnnnnnnnnnnnnnnnnnnnnnnnnnnnnnnnnnnnnnnnnnnnnnnnnnnnnnnnnnnnnnnnnnnnnnnnnnnnnnnnnnnnnnnnnnnnnnnnnnnnnnnnnnnnnnnnnnnnnnnnnnnnnnnnnnnnnnnnnnnnnnnnnnnnnnnnnnnnnnnnnnnnnnnnnnnnnnnnnnnnnnnnnnnnnnnnnnnnnnnnnnnnnnnnnnnnnnnnnnnnnnnnnnnnnnnnnnnnnnnnnnnnnnnnnnnnnnnnnnnnnnnnnnnnnnnnnnnnnnnnnnnnnnnnnnnnnnnnnnnnnnnnnnnnnnnnnnnnnnnnnnnnnnnnnnnnnnnnnnnnnnnnnnnnnnnnnnnnnnnnnnnnnnnnnnnnnnnnnnnnnnnnnnnnnnnnnnnnnnnnnnnnnnnnnnnnnnnnnnnnnnnnnnnnnnnnnnnnnnnnaatatgtaattatgagacgagtcatgatacaatggtaaaattgtgtcttaacgacttattgatcatgagttcgaatctgaaaacaacttctttgtatatacaagaataagactgcgtacattatccctcccctttaccttcgcataacaaagagcttccggacaataaggtacataattttttattcaaatatgtaattgtgtaccaacacaaataggaagtataaactaggcagaaacaaattattggtataattattaattataaaaaaagttgatattgacaaaatgaaaaacattgatgctcttattcccatccaactgctgatataataagcttctttaattatttttaaaattgaaaatagaagagttatctttgaagtggcaagcagtaacacaattaagcaaagaaggggacagaaggataccttatggaactctagtgtatctccttttgccttccgtacctcaaccatgtgaagagaaggtgccacttggaatatctgtttatgattaggtacttttgaatttcagtacaataatgtgataaatagtgtcccacatcaccaaataacaaaacaaaaaaatcatacaggtttagttaatcatttggtcccctatacttaccccaacttttcgctactttttagtccttatatgagcaattttgttttatgttttagtttgtgttaggtttttggcagtgtaaaaccactaaaaatagagacataaggactaaaatttaaaagagattactcgtatagggaccaaaataatgagtttttatgtatagggactaaaatgaaaagttgacaaaggtacaggaaacagatgattaattaaaccaatcatatacctctgtggcaacattaaggtttcccttccttccagctttcacatttgcaagcctcatctgcaggaggtgatgatttattaattttacaaacaattatttaatagaaagtcccctctgagtagaagcttgtaatttgtcaaggggataggtttaccttgtaatttttcttctgcacatcaaagccaagaggttttgcagcttcctcaatcttgttgattatctcatccgcagtggatt
